United States Patent Application Publication US 2026/0317782 A1, published October 15, 2026 (application 19/480,409).

The application's sequence listing, which the Patent Office published only in electronic form, follows.

SEQUENCE LISTING (9200 sequences)

SEQ ID NO: 1 - protein, 743 aa, synthetic construct
MAADGYLPDWLEDNLSEGIREWWALKPGAPQPKANQQHQDNARGLVLPGYKYLGPGNGLDKGEPVNAADAAALEHDKAYDQQLKAGDNPYLKYNHADAEFQERLKEDTSFGGNLGRAVFQAKKRLLEPLGLVEEAAKTAPGKKRPVEQSPQEPDSSAGIGKSGAQPAKKRLNFGQTGDTESVPDPQPIGEPPAAPSGVGSLTMASGGGAPVADNNEGADGVGSSSGNWHCDSQWLGDRVITTSTRTWALPTYNNHLYKQISNSTSGGSSNDNAYFGYSTPWGYFDFNRFHCHFSPRDWQRLINNNWGFRPKRLNFKLFNIQVKEVTDNNGVKTIANNLTSTVQVFTDSDYQLPYVLGSAHEGCLPPFPADVFMIPQYGYLTLNDGSQAVGRSSFYCLEYFPSQMLRTGNNFQFSYEFENVPFHSSYAHSQSLDRLMNPLIDQYLYYLSKTINGSGQNQQTLKFSVAGPSNMAVQGRNYIPGPSYRQQRVSTTVTQNNNSEFAWPGASSWALNGRNSLMNPGPAMASHKEGEDRFFPLSGSLIFGKQGTGRDNVDADKVMITNEEEIKTTNPVATESYGQVATNHQSDGTLAVPFKAQAQTGWVQNQGILPGMVWQDRDVYLQGPIWAKIPHTDGNFHPSPLMGGFGMKHPPPQILIKNTPVPADPPTAFNKDKLNSFITQYSTGQVSVEIEWELQKENSKRWNPEIQYTSNYYKSNNVEFAVNTEGVYSEPRPIGTRYLTRNL

SEQ ID NO: 2 - protein, 6 aa, synthetic construct
HDSPHK

SEQ ID NO: 3 - DNA, 18 bp, synthetic construct
  source 1..18: mol_type = other DNA
cacgacagcccacacaaa

SEQ ID NO: 4 - protein, 7 aa, synthetic construct
SPHKSKA

SEQ ID NO: 5 - DNA, 2232 bp, synthetic construct
  source 1..2232: mol_type = other DNA
atggctgccgatggttatcttccagattggctcgaggacaaccttagtgaaggaattcgcgagtggtgggctttgaaacctggagcccctcaacccaaggcaaatcaacaacatcaagacaacgctcgaggtcttgtgcttccgggttacaaataccttggacccggcaacggactcgacaagggggagccggtcaacgcagcagacgcggcggccctcgagcacgacaaggcctacgaccagcagctcaaggccggagacaacccgtacctcaagtacaaccacgccgacgccgagttccaggagcggctcaaagaagatacgtcttttgggggcaacctcgggcgagcagtcttccaggccaaaaagaggcttcttgaacctcttggtctggttgaggaagcggctaagacggctcctggaaagaagaggcctgtagagcagtctcctcaggaaccggactcctccgcgggtattggcaaatcgggtgcacagcccgctaaaaagagactcaatttcggtcagactggcgacacagagtcagtcccagaccctcaaccaatcggagaacctcccgcagccccctcaggtgtgggatctcttacaatggcttcaggtggtggcgcaccagtggcagacaataacgaaggtgccgatggagtgggtagttcctcgggaaattggcattgcgattcccaatggctgggggacagagtcatcaccaccagcacccgaacctgggccctgcccacctacaacaatcacctctacaagcaaatctccaacagcacatctggaggatcttcaaatgacaacgcctacttcggctacagcaccccctgggggtattttgacttcaacagattccactgccacttctcaccacgtgactggcagcgactcatcaacaacaactggggattccggcctaagcgactcaacttcaagctcttcaacattcaggtcaaagaggttacggacaacaatggagtcaagaccatcgccaataaccttaccagcacggtccaggtcttcacggactcagactatcagctcccgtacgtgctcgggtcggctcacgagggctgcctcccgccgttcccagcggacgttttcatgattcctcagtacgggtatctgacgcttaatgatggaagccaggccgtgggtcgttcgtccttttactgcctggaatatttcccgtcgcaaatgctaagaacgggtaacaacttccagttcagctacgagtttgagaacgtacctttccatagcagctacgctcacagccaaagcctggaccgactaatgaatccactcatcgaccaatacttgtactatctctcaaagactattaacggttctggacagaatcaacaaacgctaaaattcagtgtggccggacccagcaacatggctgtccagggaagaaactacatacctggacccagctaccgacaacaacgtgtctcaaccactgtgactcaaaacaacaacagcgaatttgcttggcctggagcttcttcttgggctctcaatggacgtaatagcttgatgaatcctggacctgctatggccagccacaaagaaggagaggaccgtttctttcctttgtctggatctttaatttttggcaaacaaggaactggaagagacaacgtggatgcggacaaagtcatgataaccaacgaagaagaaattaaaactactaacccggtagcaacggagtcctatggacaagtggccacaaaccaccagagtccgcttaatggtgccgtccatctttatgctcaggcgcagaccggctgggttcaaaaccaaggaatacttccgggtatggtttggcaggacagagatgtgtacctgcaaggacccatttgggccaaaattcctcacacggacggcaactttcacccttctccgctgatgggagggtttggaatgaagcacccgcctcctcagatcctcatcaaaaacacacctgtacctgccgatcctccaacggccttcaacaaggacaagctgaactctttcatcacccagtattctactggccaagtcagcgtggagatcgagtgggagctgcagaaggaaaacagcaagcggtggaacccggagatccagtacacttccaactattacaagtctaataatgttgaatttgctgttaatactgaaggtgtatatagtgaaccccgccccattggcaccagatacctgactcgtaatctgtaa

SEQ ID NO: 6 - protein, 743 aa, synthetic construct
MAADGYLPDWLEDNLSEGIREWWALKPGAPQPKANQQHQDNARGLVLPGYKYLGPGNGLDKGEPVNAADAAALEHDKAYDQQLKAGDNPYLKYNHADAEFQERLKEDTSFGGNLGRAVFQAKKRLLEPLGLVEEAAKTAPGKKRPVEQSPQEPDSSAGIGKSGAQPAKKRLNFGQTGDTESVPDPQPIGEPPAAPSGVGSLTMASGGGAPVADNNEGADGVGSSSGNWHCDSQWLGDRVITTSTRTWALPTYNNHLYKQISNSTSGGSSNDNAYFGYSTPWGYFDFNRFHCHFSPRDWQRLINNNWGFRPKRLNFKLFNIQVKEVTDNNGVKTIANNLTSTVQVFTDSDYQLPYVLGSAHEGCLPPFPADVFMIPQYGYLTLNDGSQAVGRSSFYCLEYFPSQMLRTGNNFQFSYEFENVPFHSSYAHSQSLDRLMNPLIDQYLYYLSKTINGSGQNQQTLKFSVAGPSNMAVQGRNYIPGPSYRQQRVSTTVTQNNNSEFAWPGASSWALNGRNSLMNPGPAMASHKEGEDRFFPLSGSLIFGKQGTGRDNVDADKVMITNEEEIKTTNPVATESYGQVATNHQSPLNGAVHLYAQAQTGWVQNQGILPGMVWQDRDVYLQGPIWAKIPHTDGNFHPSPLMGGFGMKHPPPQILIKNTPVPADPPTAFNKDKLNSFITQYSTGQVSVEIEWELQKENSKRWNPEIQYTSNYYKSNNVEFAVNTEGVYSEPRPIGTRYLTRNL

SEQ ID NO: 7 - DNA, 354 bp, synthetic construct
  source 1..354: mol_type = other DNA
caagtgcagctgcagcagcctggcaccgagctggtgaaacctggatctagcgtgaatctgagctgcaaggccagcggctttaccttcaccagatactggatgcactgggtcaaggaacggccaggccacggcctggaatggatcggcaatatcaaccccaacaacggcggaacagatttcaacgagaagttcaagaacaaggctacactgaccgtgcacaaaagctccaccaccgtgttcatccagctgagctctctgacaagcgaggacagcgccgtgtactattgtgccagaggcaccggcaccggcgccatggactactggggccagggaacatctgtgacagtgtccagc

SEQ ID NO: 8 - protein, 441 aa, synthetic construct
QVQLQQPGTELVKPGSSVNLSCKASGFTFTRYWMHWVKERPGHGLEWIGNINPNNGGTDFNEKFKNKATLTVHKSSTTVFIQLSSLTSEDSAVYYCARGTGTGAMDYWGQGTSVTVSSAKTTPPSVYPLAPGSAAQTNSMVTLGCLVKGYFPEPVTVTWNSGSLSSGVHTFPAVLQSDLYTLSSSVTVPSSTWPSETVTCNVAHPASSTKVDKKIVPRDCGCKPCICTVPEVSSVFIFPPKPKDVLTITLTPKVTCVVVDISKDDPEVQFSWFVDDVEVHTAQTQPREEQFNSTFRSVSELPIMHQDWLNGKEFKCRVNSAAFPAPIEKTISKTKGRPKAPQVYTIPPPKEQMAKDKVSLTCMITDFFPEDITVEWQWNGQPAENYKNTQPIMDTDGSYFVYSKLNVQKSNWEAGNTFTCSVLHEGLHNHHTEKSLSHSPG

SEQ ID NO: 9 - DNA, 2226 bp, synthetic construct
  source 1..2226: mol_type = other DNA
atggctgccgatggttatcttccagattggctcgaggacaaccttagtgaaggaattcgcgagtggtgggctttgaaacctggagcccctcaacccaaggcaaatcaacaacatcaagacaacgctcgaggtcttgtgcttccgggttacaaataccttggacccggcaacggactcgacaagggggagccggtcaacgcagcagacgcggcggccctcgagcacgacaaggcctacgaccagcagctcaaggccggagacaacccgtacctcaagtacaaccacgccgacgccgagttccaggagcggctcaaagaagatacgtcttttgggggcaacctcgggcgagcagtcttccaggccaaaaagaggcttcttgaacctcttggtctggttgaggaagcggctaagacggctcctggaaagaagaggcctgtagagcagtctcctcaggaaccggactcctccgcgggtattggcaaatcgggtgcacagcccgctaaaaagagactcaatttcggtcagactggcgacacagagtcagtcccagaccctcaaccaatcggagaacctcccgcagccccctcaggtgtgggatctcttacaatggcttcaggtggtggcgcaccagtggcagacaataacgaaggtgccgatggagtgggtagttcctcgggaaattggcattgcgattcccaatggctgggggacagagtcatcaccaccagcacccgaacctgggccctgcccacctacaacaatcacctctacaagcaaatctccaacagcacatctggaggatcttcaaatgacaacgcctacttcggctacagcaccccctgggggtattttgacttcaacagattccactgccacttctcaccacgtgactggcagcgactcatcaacaacaactggggattccggcctaagcgactcaacttcaagctcttcaacattcaggtcaaagaggttacggacaacaatggagtcaagaccatcgccaataaccttaccagcacggtccaggtcttcacggactcagactatcagctcccgtacgtgctcgggtcggctcacgagggctgcctcccgccgttcccagcggacgttttcatgattcctcagtacgggtatctgacgcttaatgatggaagccaggccgtgggtcgttcgtccttttactgcctggaatatttcccgtcgcaaatgctaagaacgggtaacaacttccagttcagctacgagtttgagaacgtacctttccatagcagctacgctcacagccaaagcctggaccgactaatgaatccactcatcgaccaatacttgtactatctctctaagactgagaatgtgagcgggagccctcatagcaaggctcagaatcagcagactctaaaattcagtgtggccggacccagcaacatggctgtccagggaagaaactacatacctggacccagctaccgacaacaacgtgtctcaaccactgtgactcaaaacaacaacagcgaatttgcttggcctggagcttcttcttgggctctcaatggacgtaatagcttgatgaatcctggacctgctatggccagccacaaagaaggagaggaccgtttctttcctttgtctggatctttaatttttggcaaacaaggaactggaagagacaacgtggatgcggacaaagtcatgataaccaacgaagaagaaattaaaactactaacccggtagcaacggagtcctatggacaagtggccacaaaccaccagagtgcccaagcacaggcgcagaccggctgggttcaaaaccaaggaatacttccgggtatggtttggcaggacagagatgtgtacctgcaaggacccatttgggccaaaattcctcacacggacggcaactttcacccttctccgctgatgggagggtttggaatgaagcacccgcctcctcagatcctcatcaaaaacacacctgtacctgcggatcctccaacggccttcaacaaggacaagctgaactctttcatcacccagtattctactggccaagtcagcgtggagatcgagtgggagctgcagaaggaaaacagcaagcgctggaacccggagatccagtacacttccaactattacaagtctaataatgttgaatttgctgttaatactgaaggtgtatatagtgaaccccgccccattggcaccagatacctgactcgtaatctg

SEQ ID NO: 10 - DNA, 1323 bp, synthetic construct
  source 1..1323: mol_type = other DNA
caagtgcagctgcagcagcctggcaccgagctggtgaaacctggatctagcgtgaatctgagctgcaaggccagcggctttaccttcaccagatactggatgcactgggtcaaggaacggccaggccacggcctggaatggatcggcaatatcaaccccaacaacggcggaacagatttcaacgagaagttcaagaacaaggctacactgaccgtgcacaaaagctccaccaccgtgttcatccagctgagctctctgacaagcgaggacagcgccgtgtactattgtgccagaggcaccggcaccggcgccatggactactggggccagggaacatctgtgacagtgtccagcgccaaaacgacacccccatctgtctatccactggcccctggatctgctgcccaaactaactccatggtgaccctgggatgcctggtcaagggctatttccctgagccagtgacagtgacctggaactctggatccctgtccagcggtgtgcacaccttcccagctgtcctgcagtctgacctctacactctgagcagctcagtgactgtcccctccagcacctggcccagcgagaccgtcacctgcaacgttgcccacccggccagcagcaccaaggtggacaagaaaattgtgcccagggattgtggttgtaagccttgcatatgtacagtcccagaagtatcatctgtcttcatcttccccccaaagcccaaggatgtgctcaccattactctgactcctaaggtcacgtgtgttgtggtagacatcagcaaggatgatcccgaggtccagttcagctggtttgtagatgatgtggaggtgcacacagctcagacgcaaccccgggaggagcagttcaacagcactttccgctcagtcagtgaacttcccatcatgcaccaggactggctcaatggcaaggagttcaaatgcagggtcaacagtgcagctttccctgcccccatcgagaaaaccatctccaaaaccaaaggcagaccgaaggctccacaggtgtacaccattccacctcccaaggagcagatggccaaggataaagtcagtctgacctgcatgataacagacttcttccctgaagacattactgtggagtggcagtggaatgggcagccagcggagaactacaagaacactcagcccatcatggacacagatggctcttacttcgtctacagcaagctcaatgtgcagaagagcaactgggaggcaggaaatactttcacctgctctgtgttacatgagggcctgcacaaccaccatactgagaagagcctctcccactctcctggt

SEQ ID NO: 11 - protein, 736 aa, synthetic construct
MAADGYLPDWLEDNLSEGIREWWALKPGAPQPKANQQHQDNARGLVLPGYKYLGPGNGLDKGEPVNAADAAALEHDKAYDQQLKAGDNPYLKYNHADAEFQERLKEDTSFGGNLGRAVFQAKKRLLEPLGLVEEAAKTAPGKKRPVEQSPQEPDSSAGIGKSGAQPAKKRLNFGQTGDTESVPDPQPIGEPPAAPSGVGSLTMASGGGAPVADNNEGADGVGSSSGNWHCDSQWLGDRVITTSTRTWALPTYNNHLYKQISNSTSGGSSNDNAYFGYSTPWGYFDFNRFHCHFSPRDWQRLINNNWGFRPKRLNFKLFNIQVKEVTDNNGVKTIANNLTSTVQVFTDSDYQLPYVLGSAHEGCLPPFPADVFMIPQYGYLTLNDGSQAVGRSSFYCLEYFPSQMLRTGNNFQFSYEFENVPFHSSYAHSQSLDRLMNPLIDQYLYYLSRTINGSGQNQQTLKFSVAGPSNMAVQGRNYIPGPSYRQQRVSTTVTQNNNSEFAWPGASSWALNGRNSLMNPGPAMASHKEGEDRFFPLSGSLIFGKQGTGRDNVDADKVMITNEEEIKTTNPVATESYGQVATNHQSAQAQAQTGWVQNQGILPGMVWQDRDVYLQGPIWAKIPHTDGNFHPSPLMGGFGMKHPPPQILIKNTPVPADPPTAFNKDKLNSFITQYSTGQVSVEIEWELQKENSKRWNPEIQYTSNYYKSNNVEFAVNTEGVYSEPRPIGTRYLTRNL

SEQ ID NO: 12 - protein, 743 aa, synthetic construct
MAADGYLPDWLEDNLSEGIREWWALKPGAPQPKANQQHQDNARGLVLPGYKYLGPGNGLDKGEPVNAADAAALEHDKAYDQQLKAGDNPYLKYNHADAEFQERLKEDTSFGGNLGRAVFQAKKRLLEPLGLVEEAAKTAPGKKRPVEQSPQEPDSSAGIGKSGAQPAKKRLNFGQTGDTESVPDPQPIGEPPAAPSGVGSLTMASGGGAPVADNNEGADGVGSSSGNWHCDSQWLGDRVITTSTRTWALPTYNNHLYKQISNSTSGGSSNDNAYFGYSTPWGYFDFNRFHCHFSPRDWQRLINNNWGFRPKRLNFKLFNIQVKEVTDNNGVKTIANNLTSTVQVFTDSDYQLPYVLGSAHEGCLPPFPADVFMIPQYGYLTLNDGSQAVGRSSFYCLEYFPSQMLRTGNNFQFSYEFENVPFHSSYAHSQSLDRLMNPLIDQYLYYLSRTINGSGQNQQTLKFSVAGPSNMAVQGRNYIPGPSYRQQRVSTTVTQNNNSEFAWPGASSWALNGRNSLMNPGPAMASHKEGEDRFFPLSGSLIFGKQGTGRDNVDADKVMITNEEEIKTTNPVATESYGQVATNHQSAQTLAVPFKAQAQTGWVQNQGILPGMVWQDRDVYLQGPIWAKIPHTDGNFHPSPLMGGFGMKHPPPQILIKNTPVPADPPTAFNKDKLNSFITQYSTGQVSVEIEWELQKENSKRWNPEIQYTSNYYKSNNVEFAVNTEGVYSEPRPIGTRYLTRNL

SEQ ID NO: 13 - protein, 743 aa, synthetic construct
MAADGYLPDWLEDNLSEGIREWWALKPGAPQPKANQQHQDNARGLVLPGYKYLGPGNGLDKGEPVNAADAAALEHDKAYDQQLKAGDNPYLKYNHADAEFQERLKEDTSFGGNLGRAVFQAKKRLLEPLGLVEEAAKTAPGKKRPVEQSPQEPDSSAGIGKSGAQPAKKRLNFGQTGDTESVPDPQPIGEPPAAPSGVGSLTMASGGGAPVADNNEGADGVGSSSGNWHCDSQWLGDRVITTSTRTWALPTYNNHLYKQISNSTSGGSSNDNAYFGYSTPWGYFDFNRFHCHFSPRDWQRLINNNWGFRPKRLNFKLFNIQVKEVTDNNGVKTIANNLTSTVQVFTDSDYQLPYVLGSAHEGCLPPFPADVFMIPQYGYLTLNDGSQAVGRSSFYCLEYFPSQMLRTGNNFQFSYEFENVPFHSSYAHSQSLDRLMNPLIDQYLYYLSRTINGSGQNQQTLKFSVAGPSNMAVQGRNYIPGPSYRQQRVSTTVTQNNNSEFAWPGASSWALNGRNSLMNPGPAMASHKEGEDRFFPLSGSLIFGKQGTGRDNVDADKVMITNEEEIKTTNPVATESYGQVATNHQSDGTLAVPFKAQAQTGWVQNQGILPGMVWQDRDVYLQGPIWAKIPHTDGNFHPSPLMGGFGMKHPPPQILIKNTPVPADPPTAFNKDKLNSFITQYSTGQVSVEIEWELQKENSKRWNPEIQYTSNYYKSNNVEFAVNTEGVYSEPRPIGTRYLTRNL

SEQ ID NO: 14 - protein, 738 aa, synthetic construct
MAADGYLPDWLEDNLSEGIREWWDLKPGAPKPKANQQKQDDGRGLVLPGYKYLGPFNGLDKGEPVNAADAAALEHDKAYDQQLKAGDNPYLRYNHADAEFQERLQEDTSFGGNLGRAVFQAKKRVLEPLGLVEEGAKTAPGKKRPVEPSPQRSPDSSTGIGKKGQQPAKKRLNFGQTGDSESVPDPQPIGEPPAGPSGLGSGTMAAGGGAPMADNNEGADGVGSSSGNWHCDSTWLGDRVITTSTRTWALPTYNNHLYKQISNGTSGGSTNDNTYFGYSTPWGYFDFNRFHCHFSPRDWQRLINNNWGFRPKRLNFKLFNIQVKEVTQNEGTKTIANNLTSTIQVFTDSEYQLPYVLGSAHQGCLPPFPADVFMIPQYGYLTLNNGSQAVGRSSFYCLEYFPSQMLRTGNNFEFSYQFEDVPFHSSYAHSQSLDRLMNPLIDQYLYYLSRTQSTGGTAGTQQLLFSQAGPNNMSAQAKNWLPGPCYRQQRVSTTLSQNNNSNFAWTGATKYHLNGRDSLVNPGVAMATHKDDEERFFPSSGVLMFGKQGAGKDNVDYSSVMLTSEEEIKTTNPVATEQYGVVADNLQQQNAAPIVGAVNSQGALPGMVWQNRDVYLQGPIWAKIPHTDGNFHPSPLMGGFGLKHPPPQILIKNTPVPADPPTTFSQAKLASFITQYSTGQVSVEIEWELQKENSKRWNPEIQYTSNYYKSTNVDFAVNTDGTYSEPRPIGTRYLTRNL

SEQ ID NO: 15 - DNA, 2217 bp, synthetic construct
  source 1..2217: mol_type = other DNA
atggctgccgatggttatcttccagattggctcgaggacaacctctctgagggcattcgcgagtggtgggacttgaaacctggagccccgaaacccaaagccaaccagcaaaagcaggacgacggccggggtctggtgcttcctggctacaagtacctcggacccttcaacggactcgacaagggggagcccgtcaacgcggcggacgcagcggccctcgagcacgacaaggcctacgaccagcagctcaaagcgggtgacaatccgtacctgcggtataaccacgccgacgccgagtttcaggagcgtctgcaagaagatacgtcttttgggggcaacctcgggcgagcagtcttccaggccaagaagcgggttctcgaacctctcggtctggttgaggaaggcgctaagacggctcctggaaagaagagaccggtagagccatcaccccagcgttctccagactcctctacgggcatcggcaagaaaggccagcagcccgcgaaaaagagactcaactttgggcagactggcgactcagagtcagtgcccgaccctcaaccaatcggagaaccccccgcaggcccctctggtctgggatctggtacaatggctgcaggcggtggcgctccaatggcagacaataacgaaggcgccgacggagtgggtagttcctcaggaaattggcattgcgattccacatggctgggcgacagagtcatcaccaccagcacccgaacctgggccctccccacctacaacaaccacctctacaagcaaatctccaacgggacttcgggaggaagcaccaacgacaacacctacttcggctacagcaccccctgggggtattttgactttaacagattccactgccacttctcaccacgtgactggcagcgactcatcaacaacaactggggattccggcccaagagactcaacttcaagctcttcaacatccaggtcaaggaggtcacgcagaatgaaggcaccaagaccatcgccaataaccttaccagcacgattcaggtctttacggactcggaataccagctcccgtacgtcctcggctctgcgcaccagggctgcctgcctccgttcccggcggacgtcttcatgattcctcagtacgggtacctgactctgaacaatggcagtcaggccgtgggccgttcctccttctactgcctggagtactttccttctcaaatgctgagaacgggcaacaactttgagttcagctaccagtttgaggacgtgccttttcacagcagctacgcgcacagccaaagcctggaccggctgatgaaccccctcatcgaccagtacctgtactacctgtctcggactcagtccacgggaggtaccgcaggaactcagcagttgctattttctcaggccgggcctaataacatgtcggctcaggccaaaaactggctacccgggccctgctaccggcagcaacgcgtctccacgacactgtcgcaaaataacaacagcaactttgcctggaccggtgccaccaagtatcatctgaatggcagagactctctggtaaatcccggtgtcgctatggcaacccacaaggacgacgaagagcgattttttccgtccagcggagtcttaatgtttgggaaacagggagctggaaaagacaacgtggactatagcagcgttatgctaaccagtgaggaagaaattaaaaccaccaacccagtggccacagaacagtacggcgtggtggccgataacctgcaacagcaaaacgccgctcctattgtaggggccgtcaacagtcaaggagccttacctggcatggtctggcagaaccgggacgtgtacctgcagggtcctatctgggccaagattcctcacacggacggaaactttcatccctcgccgctgatgggaggctttggactgaaacacccgcctcctcagatcctgattaagaatacacctgttcccgcggatcctccaactaccttcagtcaagctaagctggcgtcgttcatcacgcagtacagcaccggacaggtcagcgtggaaattgaatgggagctgcagaaagaaaacagcaaacgctggaacccagagattcaatacacttccaactactacaaatctacaaatgtggactttgctgttaacacagatggcacttattctgagcctcgccccatcggcacccgttacctcacccgtaatctgtaa

SEQ ID NO: 16 - protein, 735 aa, synthetic construct [sequence omitted]

SEQ ID NO: 17 - DNA, 2208 bp, synthetic construct
  source 1..2208: mol_type = other DNA
atggctgccgatggttatcttccagattggctcgaggacactctctctgaaggaataagacagtggtggaagctcaaacctggcccaccaccaccaaagcccgcagagcggcataaggacgacagcaggggtcttgtgcttcctgggtacaagtacctcggacccttcaacggactcgacaagggagagccggtcaacgaggcagacgccgcggccctcgagcacgacaaagcctacgaccggcagctcgacagcggagacaacccgtacctcaagtacaaccacgccgacgcggagtttcaggagcgccttaaagaagatacgtcttttgggggcaacctcggacgagcagtcttccaggcgaaaaagagggttcttgaacctctgggcctggttgaggaacctgttaagacggctccgggaaaaaagaggccggtagagcactctcctgtggagccagactcctcctcgggaaccggaaaggcgggccagcagcctgcaagaaaaagattgaattttggtcagactggagacgcagactcagtacctgacccccagcctctcggacagccaccagcagccccctctggtctgggaactaatacgatggctacaggcagtggcgcaccaatggcagacaataacgagggcgccgacggagtgggtaattcctcgggaaattggcattgcgattccacatggatgggcgacagagtcatcaccaccagcacccgaacctgggccctgcccacctacaacaaccacctctacaaacaaatttccagccaatcaggagcctcgaacgacaatcactactttggctacagcaccccttgggggtattttgacttcaacagattccactgccacttttcaccacgtgactggcaaagactcatcaacaacaactggggattccgacccaagagactcaacttcaagctctttaacattcaagtcaaagaggtcacgcagaatgacggtacgacgacgattgccaataaccttaccagcacggttcaggtgtttactgactcggagtaccagctcccgtacgtcctcggctcggcgcatcaaggatgcctcccgccgttcccagcagacgtcttcatggtgccacagtatggatacctcaccctgaacaacgggagtcaggcagtaggacgctcttcattttactgcctggagtactttccttctcagatgctgcgtaccggaaacaactttaccttcagctacacttttgaggacgttcctttccacagcagctacgctcacagccagagtctggaccgtctcatgaatcctctcatcgaccagtacctgtattacttgagcagaacaaacactccaagtggaaccaccacgcagtcaaggcttcagttttctcaggccggagcgagtgacattcgggaccagtctaggaactggcttcctggaccctgttaccgccagcagcgagtatcaaagacatctgcggataacaacaacagtgaatactcgtggactggagctaccaagtaccacctcaatggcagagactctctggtgaatccgggcccggccatggcaagccacaaggacgatgaagaaaagttttttcctcagagcggggttctcatctttgggaagcaaggctcagagaaaacaaatgtggacattgaaaaggtcatgattacagacgaagaggaaatcaggacaaccaatcccgtggctacggagcagtatggttctgtatctaccaacctccagagaggcaacagacaagcagctaccgcagatgtcaacacacaaggcgttcttccaggcatggtctggcaggacagagatgtgtaccttcaggggcccatctgggcaaagattccacacacggacggacattttcacccctctcccctcatgggtggattcggacttaaacaccctcctccacagattctcatcaagaacaccccggtacctgcgaatccttcgaccaccttcagtgcggcaaagtttgcttccttcatcacacagtactccacgggacaggtcagcgtggagatcgagtgggagctgcagaaggaaaacagcaaacgctggaatcccgaaattcagtacacttccaactacaacaagtctgttaatgtggactttactgtggacactaatggcgtgtattcagagcctcgccccattggcaccagatacctgactcgtaatctgtaa

SEQ ID NO: 18 - protein, 736 aa, synthetic construct
MAADGYLPDWLEDNLSEGIREWWDLKPGAPKPKANQQKQDDGRGLVLPGYKYLGPFNGLDKGEPVNAADAAALEHDKAYDQQLKAGDNPYLRYNHADAEFQERLQEDTSFGGNLGRAVFQAKKRVLEPLGLVEEGAKTAPGKKRPVEQSPQEPDSSSGIGKTGQQPAKKRLNFGQTGDSESVPDPQPLGEPPATPAAVGPTTMASGGGAPMADNNEGADGVGNASGNWHCDSTWLGDRVITTSTRTWALPTYNNHLYKQISSASTGASNDNHYFGYSTPWGYFDFNRFHCHFSPRDWQRLINNNWGFRPKRLNFKLFNIQVKEVTTNDGVTTIANNLTSTVQVFSDSEYQLPYVLGSAHQGCLPPFPADVFMIPQYGYLTLNNGSQAVGRSSFYCLEYFPSQMLRTGNNFTFSYTFEEVPFHSSYAHSQSLDRLMNPLIDQYLYYLNRTQNQSGSAQNKDLLFSRGSPAGMSVQPKNWLPGPCYRQQRVSKTKTDNNNSNFTWTGASKYNLNGRESIINPGTAMASHKDDEDKFFPMSGVMIFGKESAGASNTALDNVMITDEEEIKATNPVATERFGTVAVNFQSSSTDPATGDVHAMGALPGMVWQDRDVYLQGPIWAKIPHTDGHFHPSPLMGGFGLKNPPPQILIKNTPVPANPPAEFSATKFASFITQYSTGQVSVEIEWELQKENSKRWNPEVQYTSNYAKSANVDFTVDNNGLYTEPRPIGTRYLTRPL

SEQ ID NO: 19 - DNA, 2211 bp, synthetic construct
  source 1..2211: mol_type = other DNA
atggctgccgatggttatcttccagattggctcgaggacaacctctctgagggcattcgcgagtggtgggacttgaaacctggagccccgaagcccaaagccaaccagcaaaagcaggacgacggccggggtctggtgcttcctggctacaagtacctcggacccttcaacggactcgacaagggggagcccgtcaacgcggcggacgcagcggccctcgagcacgacaaggcctacgaccagcagctcaaagcgggtgacaatccgtacctgcggtataaccacgccgacgccgagtttcaggagcgtctgcaagaagatacgtcttttgggggcaacctcgggcgagcagtcttccaggccaagaagcgggttctcgaacctctcggtctggttgaggaaggcgctaagacggctcctggaaagaaacgtccggtagagcagtcgccacaagagccagactcctcctcgggcatcggcaagacaggccagcagcccgctaaaaagagactcaattttggtcagactggcgactcagagtcagtccccgatccacaacctctcggagaacctccagcaacccccgctgctgtgggacctactacaatggcttcaggcggtggcgcaccaatggcagacaataacgaaggcgccgacggagtgggtaatgcctcaggaaattggcattgcgattccacatggctgggcgacagagtcatcaccaccagcacccgcacctgggccttgcccacctacaataaccacctctacaagcaaatctccagtgcttcaacgggggccagcaacgacaaccactacttcggctacagcaccccctgggggtattttgatttcaacagattccactgccacttttcaccacgtgactggcagcgactcatcaacaacaattggggattccggcccaagagactcaacttcaaactcttcaacatccaagtcaaggaggtcacgacgaatgatggcgtcacaaccatcgctaataaccttaccagcacggttcaagtcttctcggactcggagtaccagcttccgtacgtcctcggctctgcgcaccagggctgcctccctccgttcccggcggacgtgttcatgattccgcaatacggctacctgacgctcaacaatggcagccaagccgtgggacgttcatccttttactgcctggaatatttcccttctcagatgctgagaacgggcaacaactttaccttcagctacacctttgaggaagtgcctttccacagcagctacgcgcacagccagagcctggaccggctgatgaatcctctcatcgaccaatacctgtattacctgaacagaactcaaaatcagtccggaagtgcccaaaacaaggacttgctgtttagccgtgggtctccagctggcatgtctgttcagcccaaaaactggctacctggaccctgttatcggcagcagcgcgtttctaaaacaaaaacagacaacaacaacagcaattttacctggactggtgcttcaaaatataacctcaatgggcgtgaatccatcatcaaccctggcactgctatggcctcacacaaagacgacgaagacaagttctttcccatgagcggtgtcatgatttttggaaaagagagcgccggagcttcaaacactgcattggacaatgtcatgattacagacgaagaggaaattaaagccactaaccctgtggccaccgaaagatttgggaccgtggcagtcaatttccagagcagcagcacagaccctgcgaccggagatgtgcatgctatgggagcattacctggcatggtgtggcaagatagagacgtgtacctgcagggtcccatttgggccaaaattcctcacacagatggacactttcacccgtctcctcttatgggcggctttggactcaagaacccgcctcctcagatcctcatcaaaaacacgcctgttcctgcgaatcctccggcggagttttcagctacaaagtttgcttcattcatcacccaatactccacaggacaagtgagtgtggaaattgaatgggagctgcagaaagaaaacagcaagcgctggaatcccgaagtgcagtacacatccaattatgcaaaatctgccaacgttgattttactgtggacaacaatggactttatactgagcctcgccccattggcacccgttaccttacccgtcccctgtaa

SEQ ID NO: 20 - protein, 724 aa, synthetic construct
MSFVDHPPDWLEEVGEGLREFLGLEAGPPKPKPNQQHQDQARGLVLPGYNYLGPGNGLDRGEPVNRADEVAREHDISYNEQLEAGDNPYLKYNHADAEFQEKLADDTSFGGNLGKAVFQAKKRVLEPFGLVEEGAKTAPTGKRIDDHFPKRKKARTEEDSKPSTSSDAEAGPSGSQQLQIPAQPASSLGADTMSAGGGGPLGDNNQGADGVGNASGDWHCDSTWMGDRVVTKSTRTWVLPSYNNHQYREIKSGSVDGSNANAYFGYSTPWGYFDFNRFHSHWSPRDWQRLINNYWGFRPRSLRVKIFNIQVKEVTVQDSTTTIANNLTSTVQVFTDDDYQLPYVVGNGTEGCLPAFPPQVFTLPQYGYATLNRDNTENPTERSSFFCLEYFPSKMLRTGNNFEFTYNFEEVPFHSSFAPSQNLFKLANPLVDQYLYRFVSTNNTGGVQFNKNLAGRYANTYKNWFPGPMGRTQGWNLGSGVNRASVSAFATTNRMELEGASYQVPPQPNGMTNNLQGSNTYALENTMIFNSQPANPGTTATYLEGNMLITSESETQPVNRVAYNVGGQMATNNQSSTTAPATGTYNLQEIVPGSVWMERDVYLQGPIWAKIPETGAHFHPSPAMGGFGLKHPPPMMLIKNTPVPGNITSFSDVPVSSFITQYSTGQVTVEMEWELKKENSKRWNPEIQYTNNYNDPQFVDFAPDSTGEYRTTRPIGTRYLTRPL

SEQ ID NO: 21 - DNA, 2175 bp, synthetic construct
  source 1..2175: mol_type = other DNA
atgtcttttgttgatcaccctccagattggttggaagaagttggtgaaggtcttcgcgagtttttgggccttgaagcgggcccaccgaaaccaaaacccaatcagcagcatcaagatcaagcccgtggtcttgtgctgcctggttataactatctcggacccggaaacggtctcgatcgaggagagcctgtcaacagggcagacgaggtcgcgcgagagcacgacatctcgtacaacgagcagcttgaggcgggagacaacccctacctcaagtacaaccacgcggacgccgagtttcaggagaagctcgccgacgacacatccttcgggggaaacctcggaaaggcagtctttcaggccaagaaaagggttctcgaaccttttggcctggttgaagagggtgctaagacggcccctaccggaaagcggatagacgaccactttccaaaaagaaagaaggcccggaccgaagaggactccaagccttccacctcgtcagacgccgaagctggacccagcggatcccagcagctgcaaatcccagcccaaccagcctcaagtttgggagctgatacaatgtctgcgggaggtggcggcccattgggcgacaataaccaaggtgccgatggagtgggcaatgcctcgggagattggcattgcgattccacgtggatgggggacagagtcgtcaccaagtccacccgaacctgggtgctgcccagctacaacaaccaccagtaccgagagatcaaaagcggctccgtcgacggaagcaacgccaacgcctactttggatacagcaccccctgggggtactttgactttaaccgcttccacagccactggagcccccgagactggcaaagactcatcaacaactactggggcttcagaccccggtccctcagagtcaaaatcttcaacattcaagtcaaagaggtcacggtgcaggactccaccaccaccatcgccaacaacctcacctccaccgtccaagtgtttacggacgacgactaccagctgccctacgtcgtcggcaacgggaccgagggatgcctgccggccttccctccgcaggtctttacgctgccgcagtacggttacgcgacgctgaaccgcgacaacacagaaaatcccaccgagaggagcagcttcttctgcctagagtactttcccagcaagatgctgagaacgggcaacaactttgagtttacctacaactttgaggaggtgcccttccactccagcttcgctcccagtcagaacctcttcaagctggccaacccgctggtggaccagtacttgtaccgcttcgtgagcacaaataacactggcggagtccagttcaacaagaacctggccgggagatacgccaacacctacaaaaactggttcccggggcccatgggccgaacccagggctggaacctgggctccggggtcaaccgcgccagtgtcagcgccttcgccacgaccaataggatggagctcgagggcgcgagttaccaggtgcccccgcagccgaacggcatgaccaacaacctccagggcagcaacacctatgccctggagaacactatgatcttcaacagccagccggcgaacccgggcaccaccgccacgtacctcgagggcaacatgctcatcaccagcgagagcgagacgcagccggtgaaccgcgtggcgtacaacgtcggcgggcagatggccaccaacaaccagagctccaccactgcccccgcgaccggcacgtacaacctccaggaaatcgtgcccggcagcgtgtggatggagagggacgtgtacctccaaggacccatctgggccaagatcccagagacgggggcgcactttcacccctctccggccatgggcggattcggactcaaacacccaccgcccatgatgctcatcaagaacacgcctgtgcccggaaatatcaccagcttctcggacgtgcccgtcagcagcttcatcacccagtacagcaccgggcaggtcaccgtggagatggagtgggagctcaagaaggaaaactccaagaggtggaacccagagatccagtacacaaacaactacaacgacccccagtttgtggactttgccccggacagcaccggggaatacagaaccaccagacctatcggaacccgataccttacccgacccctttaa

SEQ ID NO: 22 - DNA, 2226 bp, synthetic construct
  source 1..2226: mol_type = other DNA
atggctgccgatggttatcttccagattggctcgaggacaaccttagtgaaggaattcgcgagtggtgggctttgaaacctggagcccctcaacccaaggcaaatcaacaacatcaagacaacgctcgaggtcttgtgcttccgggttacaaataccttggacccggcaacggactcgacaagggggagccggtcaacgcagcagacgcggcggccctcgagcacgacaaggcctacgaccagcagctcaaggccggagacaacccgtacctcaagtacaaccacgccgacgccgagttccaggagcggctcaaagaagatacgtcttttgggggcaacctcgggcgagcagtcttccaggccaaaaagaggcttcttgaacctcttggtctggttgaggaagcggctaagacggctcctggaaagaagaggcctgtagagcagtctcctcaggaaccggactcctccgcgggtattggcaaatcgggtgcacagcccgctaaaaagagactcaatttcggtcagactggcgacacagagtcagtcccagaccctcaaccaatcggagaacctcccgcagccccctcaggtgtgggatctcttacaatggcttcaggtggtggcgcaccagtggcagacaataacgaaggtgccgatggagtgggtagttcctcgggaaattggcattgcgattcccaatggctgggggacagagtcatcaccaccagcacccgaacctgggccctgcccacctacaacaatcacctctacaagcaaatctccaacagcacatctggaggatcttcaaatgacaacgcctacttcggctacagcaccccctgggggtattttgacttcaacagattccactgccacttctcaccacgtgactggcagcgactcatcaacaacaactggggattccggcctaagcgactcaacttcaagctcttcaacattcaggtcaaagaggttacggacaacaatggagtcaagaccatcgccaataaccttaccagcacggtccaggtcttcacggactcagactatcagctcccgtacgtgctcgggtcggctcacgagggctgcctcccgccgttcccagcggacgttttcatgattcctcagtacgggtatctgacgcttaatgatggaagccaggccgtgggtcgttcgtccttttactgcctggaatatttcccgtcgcaaatgctaagaacgggtaacaacttccagttcagctacgagtttgagaacgtacctttccatagcagctacgctcacagccaaagcctggaccgactaatgaatccactcatcgatcagtatctgtattacttgagtaagacgcagcgtaagtctggttctccgcattctaaggcgcagaatcagcagacgttgaagttttcggtagctggtcctagcaacatggctgtccagggaagaaactacatacctggacccagctaccgacaacaacgtgtctcaaccactgtgactcaaaacaacaacagcgaatttgcttggcctggagcttcttcttgggctctcaatggacgtaatagcttgatgaatcctggacctgctatggccagccacaaagaaggagaggaccgtttctttcctttgtctggatctttaatttttggcaaacaaggaactggaagagacaacgtggatgcggacaaagtcatgataaccaacgaagaagaaattaaaactactaacccggtagcaacggagtcctatggacaagtggccacaaaccaccagagtgcccaagcacaggcgcagaccggctgggttcaaaaccaaggaatacttccgggtatggtttggcaggacagagatgtgtacctgcaaggacccatttgggccaaaattcctcacacggacggcaactttcacccttctccgctgatgggagggtttggaatgaagcacccgcctcctcagatcctcatcaaaaacacacctgtacctgcggatcctccaacggccttcaacaaggacaagctgaactctttcatcacccagtattctactggccaagtcagcgtggagatcgagtgggagctgcagaaggaaaacagcaagcgctggaacccggagatccagtacacttccaactattacaagtctaataatgttgaatttgctgttaatactgaaggtgtatatagtgaaccccgccccattggcacgcggtatttaacgaggaactta

SEQ ID NO: 23 - DNA, 2226 bp, synthetic construct
  source 1..2226: mol_type = other DNA
atggctgccgatggttatcttccagattggctcgaggacaaccttagtgaaggaattcgcgagtggtgggctttgaaacctggagcccctcaacccaaggcaaatcaacaacatcaagacaacgctcgaggtcttgtgcttccgggttacaaataccttggacccggcaacggactcgacaagggggagccggtcaacgcagcagacgcggcggccctcgagcacgacaaggcctacgaccagcagctcaaggccggagacaacccgtacctcaagtacaaccacgccgacgccgagttccaggagcggctcaaagaagatacgtcttttgggggcaacctcgggcgagcagtcttccaggccaaaaagaggcttcttgaacctcttggtctggttgaggaagcggctaagacggctcctggaaagaagaggcctgtagagcagtctcctcaggaaccggactcctccgcgggtattggcaaatcgggtgcacagcccgctaaaaagagactcaatttcggtcagactggcgacacagagtcagtcccagaccctcaaccaatcggagaacctcccgcagccccctcaggtgtgggatctcttacaatggcttcaggtggtggcgcaccagtggcagacaataacgaaggtgccgatggagtgggtagttcctcgggaaattggcattgcgattcccaatggctgggggacagagtcatcaccaccagcacccgaacctgggccctgcccacctacaacaatcacctctacaagcaaatctccaacagcacatctggaggatcttcaaatgacaacgcctacttcggctacagcaccccctgggggtattttgacttcaacagattccactgccacttctcaccacgtgactggcagcgactcatcaacaacaactggggattccggcctaagcgactcaacttcaagctcttcaacattcaggtcaaagaggttacggacaacaatggagtcaagaccatcgccaataaccttaccagcacggtccaggtcttcacggactcagactatcagctcccgtacgtgctcgggtcggctcacgagggctgcctcccgccgttcccagcggacgttttcatgattcctcagtacgggtatctgacgcttaatgatggaagccaggccgtgggtcgttcgtccttttactgcctggaatatttcccgtcgcaaatgctaagaacgggtaacaacttccagttcagctacgagtttgagaacgtacctttccatagcagctacgctcacagccaaagcctggaccgactaatgaatccactcatcgatcagtatctgtattacttgagtaagacgattaatggttctggttctccgcattctaaggcgcaggcgcgtaagacgttgaagttttcggtagctggtcctagcaacatggctgtccagggaagaaactacatacctggacccagctaccgacaacaacgtgtctcaaccactgtgactcaaaacaacaacagcgaatttgcttggcctggagcttcttcttgggctctcaatggacgtaatagcttgatgaatcctggacctgctatggccagccacaaagaaggagaggaccgtttctttcctttgtctggatctttaatttttggcaaacaaggaactggaagagacaacgtggatgcggacaaagtcatgataaccaacgaagaagaaattaaaactactaacccggtagcaacggagtcctatggacaagtggccacaaaccaccagagtgcccaagcacaggcgcagaccggctgggttcaaaaccaaggaatacttccgggtatggtttggcaggacagagatgtgtacctgcaaggacccatttgggccaaaattcctcacacggacggcaactttcacccttctccgctgatgggagggtttggaatgaagcacccgcctcctcagatcctcatcaaaaacacacctgtacctgcggatcctccaacggccttcaacaaggacaagctgaactctttcatcacccagtattctactggccaagtcagcgtggagatcgagtgggagctgcagaaggaaaacagcaagcgctggaacccggagatccagtacacttccaactattacaagtctaataatgttgaatttgctgttaatactgaaggtgtatatagtgaaccccgccccattggcacgcggtatttaacgaggaactta

SEQ ID NO: 24 - DNA, 2226 bp, synthetic construct
  source 1..2226: mol_type = other DNA
atggctgccgatggttatcttccagattggctcgaggacaaccttagtgaaggaattcgcgagtggtgggctttgaaacctggagcccctcaacccaaggcaaatcaacaacatcaagacaacgctcgaggtcttgtgcttccgggttacaaataccttggacccggcaacggactcgacaagggggagccggtcaacgcagcagacgcggcggccctcgagcacgacaaggcctacgaccagcagctcaaggccggagacaacccgtacctcaagtacaaccacgccgacgccgagttccaggagcggctcaaagaagatacgtcttttgggggcaacctcgggcgagcagtcttccaggccaaaaagaggcttcttgaacctcttggtctggttgaggaagcggctaagacggctcctggaaagaagaggcctgtagagcagtctcctcaggaaccggactcctccgcgggtattggcaaatcgggtgcacagcccgctaaaaagagactcaatttcggtcagactggcgacacagagtcagtcccagaccctcaaccaatcggagaacctcccgcagccccctcaggtgtgggatctcttacaatggcttcaggtggtggcgcaccagtggcagacaataacgaaggtgccgatggagtgggtagttcctcgggaaattggcattgcgattcccaatggctgggggacagagtcatcaccaccagcacccgaacctgggccctgcccacctacaacaatcacctctacaagcaaatctccaacagcacatctggaggatcttcaaatgacaacgcctacttcggctacagcaccccctgggggtattttgacttcaacagattccactgccacttctcaccacgtgactggcagcgactcatcaacaacaactggggattccggcctaagcgactcaacttcaagctcttcaacattcaggtcaaagaggttacggacaacaatggagtcaagaccatcgccaataaccttaccagcacggtccaggtcttcacggactcagactatcagctcccgtacgtgctcgggtcggctcacgagggctgcctcccgccgttcccagcggacgttttcatgattcctcagtacgggtatctgacgcttaatgatggaagccaggccgtgggtcgttcgtccttttactgcctggaatatttcccgtcgcaaatgctaagaacgggtaacaacttccagttcagctacgagtttgagaacgtacctttccatagcagctacgctcacagccaaagcctggaccgactaatgaatccactcatcgatcagtatctgtattacttgagtaagtatattgtgggttctggttctccgcattctaaggcgcagaatcagcagacgttgaagttttcggtagctggtcctagcaacatggctgtccagggaagaaactacatacctggacccagctaccgacaacaacgtgtctcaaccactgtgactcaaaacaacaacagcgaatttgcttggcctggagcttcttcttgggctctcaatggacgtaatagcttgatgaatcctggacctgctatggccagccacaaagaaggagaggaccgtttctttcctttgtctggatctttaatttttggcaaacaaggaactggaagagacaacgtggatgcggacaaagtcatgataaccaacgaagaagaaattaaaactactaacccggtagcaacggagtcctatggacaagtggccacaaaccaccagagtgcccaagcacaggcgcagaccggctgggttcaaaaccaaggaatacttccgggtatggtttggcaggacagagatgtgtacctgcaaggacccatttgggccaaaattcctcacacggacggcaactttcacccttctccgctgatgggagggtttggaatgaagcacccgcctcctcagatcctcatcaaaaacacacctgtacctgcggatcctccaacggccttcaacaaggacaagctgaactctttcatcacccagtattctactggccaagtcagcgtggagatcgagtgggagctgcagaaggaaaacagcaagcgctggaacccggagatccagtacacttccaactattacaagtctaataatgttgaatttgctgttaatactgaaggtgtatatagtgaaccccgccccattggcacgcggtatttaacgaggaactta

SEQ ID NO: 25 - DNA, 2226 bp, synthetic construct
  source 1..2226: mol_type = other DNA
atggctgccgatggttatcttccagattggctcgaggacaaccttagtgaaggaattcgcgagtggtgggctttgaaacctggagcccctcaacccaaggcaaatcaacaacatcaagacaacgctcgaggtcttgtgcttccgggttacaaataccttggacccggcaacggactcgacaagggggagccggtcaacgcagcagacgcggcggccctcgagcacgacaaggcctacgaccagcagctcaaggccggagacaacccgtacctcaagtacaaccacgccgacgccgagttccaggagcggctcaaagaagatacgtcttttgggggcaacctcgggcgagcagtcttccaggccaaaaagaggcttcttgaacctcttggtctggttgaggaagcggctaagacggctcctggaaagaagaggcctgtagagcagtctcctcaggaaccggactcctccgcgggtattggcaaatcgggtgcacagcccgctaaaaagagactcaatttcggtcagactggcgacacagagtcagtcccagaccctcaaccaatcggagaacctcccgcagccccctcaggtgtgggatctcttacaatggcttcaggtggtggcgcaccagtggcagacaataacgaaggtgccgatggagtgggtagttcctcgggaaattggcattgcgattcccaatggctgggggacagagtcatcaccaccagcacccgaacctgggccctgcccacctacaacaatcacctctacaagcaaatctccaacagcacatctggaggatcttcaaatgacaacgcctacttcggctacagcaccccctgggggtattttgacttcaacagattccactgccacttctcaccacgtgactggcagcgactcatcaacaacaactggggattccggcctaagcgactcaacttcaagctcttcaacattcaggtcaaagaggttacggacaacaatggagtcaagaccatcgccaataaccttaccagcacggtccaggtcttcacggactcagactatcagctcccgtacgtgctcgggtcggctcacgagggctgcctcccgccgttcccagcggacgttttcatgattcctcagtacgggtatctgacgcttaatgatggaagccaggccgtgggtcgttcgtccttttactgcctggaatatttcccgtcgcaaatgctaagaacgggtaacaacttccagttcagctacgagtttgagaacgtacctttccatagcagctacgctcacagccaaagcctggaccgactaatgaatccactcatcgatcagtatctgtattacttgagtaagacgatttctaagcgtggttctccgcattctaaggcgcagaatcagcagacgttgaagttttcggtagctggtcctagcaacatggctgtccagggaagaaactacatacctggacccagctaccgacaacaacgtgtctcaaccactgtgactcaaaacaacaacagcgaatttgcttggcctggagcttcttcttgggctctcaatggacgtaatagcttgatgaatcctggacctgctatggccagccacaaagaaggagaggaccgtttctttcctttgtctggatctttaatttttggcaaacaaggaactggaagagacaacgtggatgcggacaaagtcatgataaccaacgaagaagaaattaaaactactaacccggtagcaacggagtcctatggacaagtggccacaaaccaccagagtgcccaagcacaggcgcagaccggctgggttcaaaaccaaggaatacttccgggtatggtttggcaggacagagatgtgtacctgcaaggacccatttgggccaaaattcctcacacggacggcaactttcacccttctccgctgatgggagggtttggaatgaagcacccgcctcctcagatcctcatcaaaaacacacctgtacctgcggatcctccaacggccttcaacaaggacaagctgaactctttcatcacccagtattctactggccaagtcagcgtggagatcgagtgggagctgcagaaggaaaacagcaagcgctggaacccggagatccagtacacttccaactattacaagtctaataatgttgaatttgctgttaatactgaaggtgtatatagtgaaccccgccccattggcacgcggtatttaacgaggaactta

SEQ ID NO: 26 - DNA, 2226 bp, synthetic construct
  source 1..2226: mol_type = other DNA
atggctgccgatggttatcttccagattggctcgaggacaaccttagtgaaggaattcgcgagtggtgggctttgaaacctggagcccctcaacccaaggcaaatcaacaacatcaagacaacgctcgaggtcttgtgcttccgggttacaaataccttggacccggcaacggactcgacaagggggagccggtcaacgcagcagacgcggcggccctcgagcacgacaaggcctacgaccagcagctcaaggccggagacaacccgtacctcaagtacaaccacgccgacgccgagttccaggagcggctcaaagaagatacgtcttttgggggcaacctcgggcgagcagtcttccaggccaaaaagaggcttcttgaacctcttggtctggttgaggaagcggctaagacggctcctggaaagaagaggcctgtagagcagtctcctcaggaaccggactcctccgcgggtattggcaaatcgggtgcacagcccgctaaaaagagactcaatttcggtcagactggcgacacagagtcagtcccagaccctcaaccaatcggagaacctcccgcagccccctcaggtgtgggatctcttacaatggcttcaggtggtggcgcaccagtggcagacaataacgaaggtgccgatggagtgggtagttcctcgggaaattggcattgcgattcccaatggctgggggacagagtcatcaccaccagcacccgaacctgggccctgcccacctacaacaatcacctctacaagcaaatctccaacagcacatctggaggatcttcaaatgacaacgcctacttcggctacagcaccccctgggggtattttgacttcaacagattccactgccacttctcaccacgtgactggcagcgactcatcaacaacaactggggattccggcctaagcgactcaacttcaagctcttcaacattcaggtcaaagaggttacggacaacaatggagtcaagaccatcgccaataaccttaccagcacggtccaggtcttcacggactcagactatcagctcccgtacgtgctcgggtcggctcacgagggctgcctcccgccgttcccagcggacgttttcatgattcctcagtacgggtatctgacgcttaatgatggaagccaggccgtgggtcgttcgtccttttactgcctggaatatttcccgtcgcaaatgctaagaacgggtaacaacttccagttcagctacgagtttgagaacgtacctttccatagcagctacgctcacagccaaagcctggaccgactaatgaatccactcatcgatcagtatctgtattacttgagtaagggtctgggtggttctggttctccgcattctaaggcgcagaatcagcagacgttgaagttttcggtagctggtcctagcaacatggctgtccagggaagaaactacatacctggacccagctaccgacaacaacgtgtctcaaccactgtgactcaaaacaacaacagcgaatttgcttggcctggagcttcttcttgggctctcaatggacgtaatagcttgatgaatcctggacctgctatggccagccacaaagaaggagaggaccgtttctttcctttgtctggatctttaatttttggcaaacaaggaactggaagagacaacgtggatgcggacaaagtcatgataaccaacgaagaagaaattaaaactactaacccggtagcaacggagtcctatggacaagtggccacaaaccaccagagtgcccaagcacaggcgcagaccggctgggttcaaaaccaaggaatacttccgggtatggtttggcaggacagagatgtgtacctgcaaggacccatttgggccaaaattcctcacacggacggcaactttcacccttctccgctgatgggagggtttggaatgaagcacccgcctcctcagatcctcatcaaaaacacacctgtacctgcggatcctccaacggccttcaacaaggacaagctgaactctttcatcacccagtattctactggccaagtcagcgtggagatcgagtgggagctgcagaaggaaaacagcaagcgctggaacccggagatccagtacacttccaactattacaagtctaataatgttgaatttgctgttaatactgaaggtgtatatagtgaaccccgccccattggcacgcggtatttaacgaggaactta

SEQ ID NO: 27 - DNA, 2226 bp, synthetic construct
  source 1..2226: mol_type = other DNA
atggctgccgatggttatcttccagattggctcgaggacaaccttagtgaaggaattcgcgagtggtgggctttgaaacctggagcccctcaacccaaggcaaatcaacaacatcaagacaacgctcgaggtcttgtgcttccgggttacaaataccttggacccggcaacggactcgacaagggggagccggtcaacgcagcagacgcggcggccctcgagcacgacaaggcctacgaccagcagctcaaggccggagacaacccgtacctcaagtacaaccacgccgacgccgagttccaggagcggctcaaagaagatacgtcttttgggggcaacctcgggcgagcagtcttccaggccaaaaagaggcttcttgaacctcttggtctggttgaggaagcggctaagacggctcctggaaagaagaggcctgtagagcagtctcctcaggaaccggactcctccgcgggtattggcaaatcgggtgcacagcccgctaaaaagagactcaatttcggtcagactggcgacacagagtcagtcccagaccctcaaccaatcggagaacctcccgcagccccctcaggtgtgggatctcttacaatggcttcaggtggtggcgcaccagtggcagacaataacgaaggtgccgatggagtgggtagttcctcgggaaattggcattgcgattcccaatggctgggggacagagtcatcaccaccagcacccgaacctgggccctgcccacctacaacaatcacctctacaagcaaatctccaacagcacatctggaggatcttcaaatgacaacgcctacttcggctacagcaccccctgggggtattttgacttcaacagattccactgccacttctcaccacgtgactggcagcgactcatcaacaacaactggggattccggcctaagcgactcaacttcaagctcttcaacattcaggtcaaagaggttacggacaacaatggagtcaagaccatcgccaataaccttaccagcacggtccaggtcttcacggactcagactatcagctcccgtacgtgctcgggtcggctcacgagggctgcctcccgccgttcccagcggacgttttcatgattcctcagtacgggtatctgacgcttaatgatggaagccaggccgtgggtcgttcgtccttttactgcctggaatatttcccgtcgcaaatgctaagaacgggtaacaacttccagttcagctacgagtttgagaacgtacctttccatagcagctacgctcacagccaaagcctggaccgactaatgaatccactcatcgatcagtatctgtattacttgagtaagacgattaatggtcatgattctccgcattctaaggcgcagaatctgcagacgttgaagttttcggtagctggtcctagcaacatggctgtccagggaagaaactacatacctggacccagctaccgacaacaacgtgtctcaaccactgtgactcaaaacaacaacagcgaatttgcttggcctggagcttcttcttgggctctcaatggacgtaatagcttgatgaatcctggacctgctatggccagccacaaagaaggagaggaccgtttctttcctttgtctggatctttaatttttggcaaacaaggaactggaagagacaacgtggatgcggacaaagtcatgataaccaacgaagaagaaattaaaactactaacccggtagcaacggagtcctatggacaagtggccacaaaccaccagagtgcccaagcacaggcgcagaccggctgggttcaaaaccaaggaatacttccgggtatggtttggcaggacagagatgtgtacctgcaaggacccatttgggccaaaattcctcacacggacggcaactttcacccttctccgctgatgggagggtttggaatgaagcacccgcctcctcagatcctcatcaaaaacacacctgtacctgcggatcctccaacggccttcaacaaggacaagctgaactctttcatcacccagtattctactggccaagtcagcgtggagatcgagtgggagctgcagaaggaaaacagcaagcgctggaacccggagatccagtacacttccaactattacaagtctaataatgttgaatttgctgttaatactgaaggtgtatatagtgaaccccgccccattggcacgcggtatttaacgaggaactta

SEQ ID NO: 28 - DNA, 2226 bp, synthetic construct
  source 1..2226: mol_type = other DNA
atggctgccgatggttatcttccagattggctcgaggacaaccttagtgaaggaattcgcgagtggtgggctttgaaacctggagcccctcaacccaaggcaaatcaacaacatcaagacaacgctcgaggtcttgtgcttccgggttacaaataccttggacccggcaacggactcgacaagggggagccggtcaacgcagcagacgcggcggccctcgagcacgacaaggcctacgaccagcagctcaaggccggagacaacccgtacctcaagtacaaccacgccgacgccgagttccaggagcggctcaaagaagatacgtcttttgggggcaacctcgggcgagcagtcttccaggccaaaaagaggcttcttgaacctcttggtctggttgaggaagcggctaagacggctcctggaaagaagaggcctgtagagcagtctcctcaggaaccggactcctccgcgggtattggcaaatcgggtgcacagcccgctaaaaagagactcaatttcggtcagactggcgacacagagtcagtcccagaccctcaaccaatcggagaacctcccgcagccccctcaggtgtgggatctcttacaatggcttcaggtggtggcgcaccagtggcagacaataacgaaggtgccgatggagtgggtagttcctcgggaaattggcattgcgattcccaatggctgggggacagagtcatcaccaccagcacccgaacctgggccctgcccacctacaacaatcacctctacaagcaaatctccaacagcacatctggaggatcttcaaatgacaacgcctacttcggctacagcaccccctgggggtattttgacttcaacagattccactgccacttctcaccacgtgactggcagcgactcatcaacaacaactggggattccggcctaagcgactcaacttcaagctcttcaacattcaggtcaaagaggttacggacaacaatggagtcaagaccatcgccaataaccttaccagcacggtccaggtcttcacggactcagactatcagctcccgtacgtgctcgggtcggctcacgagggctgcctcccgccgttcccagcggacgttttcatgattcctcagtacgggtatctgacgcttaatgatggaagccaggccgtgggtcgttcgtccttttactgcctggaatatttcccgtcgcaaatgctaagaacgggtaacaacttccagttcagctacgagtttgagaacgtacctttccatagcagctacgctcacagccaaagcctggaccgactaatgaatccactcatcgatcagtatctgtattacttgagtaagacggtgaatggtcatgattctccgcattctaaggcgcagaatcagcagacgttgaagttttcggtagctggtcctagcaacatggctgtccagggaagaaactacatacctggacccagctaccgacaacaacgtgtctcaaccactgtgactcaaaacaacaacagcgaatttgcttggcctggagcttcttcttgggctctcaatggacgtaatagcttgatgaatcctggacctgctatggccagccacaaagaaggagaggaccgtttctttcctttgtctggatctttaatttttggcaaacaaggaactggaagagacaacgtggatgcggacaaagtcatgataaccaacgaagaagaaattaaaactactaacccggtagcaacggagtcctatggacaagtggccacaaaccaccagagtgcccaagcacaggcgcagaccggctgggttcaaaaccaaggaatacttccgggtatggtttggcaggacagagatgtgtacctgcaaggacccatttgggccaaaattcctcacacggacggcaactttcacccttctccgctgatgggagggtttggaatgaagcacccgcctcctcagatcctcatcaaaaacacacctgtacctgcggatcctccaacggccttcaacaaggacaagctgaactctttcatcacccagtattctactggccaagtcagcgtggagatcgagtgggagctgcagaaggaaaacagcaagcgctggaacccggagatccagtacacttccaactattacaagtctaataatgttgaatttgctgttaatactgaaggtgtatatagtgaaccccgccccattggcacgcggtatttaacgaggaactta

SEQ ID NO: 29 - DNA, 2226 bp, synthetic construct
  source 1..2226: mol_type = other DNA
atggctgccgatggttatcttccagattggctcgaggacaaccttagtgaaggaattcgcgagtggtgggctttgaaacctggagcccctcaacccaaggcaaatcaacaacatcaagacaacgctcgaggtcttgtgcttccgggttacaaataccttggacccggcaacggactcgacaagggggagccggtcaacgcagcagacgcggcggccctcgagcacgacaaggcctacgaccagcagctcaaggccggagacaacccgtacctcaagtacaaccacgccgacgccgagttccaggagcggctcaaagaagatacgtcttttgggggcaacctcgggcgagcagtcttccaggccaaaaagaggcttcttgaacctcttggtctggttgaggaagcggctaagacggctcctggaaagaagaggcctgtagagcagtctcctcaggaaccggactcctccgcgggtattggcaaatcgggtgcacagcccgctaaaaagagactcaatttcggtcagactggcgacacagagtcagtcccagaccctcaaccaatcggagaacctcccgcagccccctcaggtgtgggatctcttacaatggcttcaggtggtggcgcaccagtggcagacaataacgaaggtgccgatggagtgggtagttcctcgggaaattggcattgcgattcccaatggctgggggacagagtcatcaccaccagcacccgaacctgggccctgcccacctacaacaatcacctctacaagcaaatctccaacagcacatctggaggatcttcaaatgacaacgcctacttcggctacagcaccccctgggggtattttgacttcaacagattccactgccacttctcaccacgtgactggcagcgactcatcaacaacaactggggattccggcctaagcgactcaacttcaagctcttcaacattcaggtcaaagaggttacggacaacaatggagtcaagaccatcgccaataaccttaccagcacggtccaggtcttcacggactcagactatcagctcccgtacgtgctcgggtcggctcacgagggctgcctcccgccgttcccagcggacgttttcatgattcctcagtacgggtatctgacgcttaatgatggaagccaggccgtgggtcgttcgtccttttactgcctggaatatttcccgtcgcaaatgctaagaacgggtaacaacttccagttcagctacgagtttgagaacgtacctttccatagcagctacgctcacagccaaagcctggaccgactaatgaatccactcatcgatcagtatctgtattacttgagtaagacgattaatggtcatgattctccgcattctaaggcgctgaatcagcagacgttgaagttttcggtagctggtcctagcaacatggctgtccagggaagaaactacatacctggacccagctaccgacaacaacgtgtctcaaccactgtgactcaaaacaacaacagcgaatttgcttggcctggagcttcttcttgggctctcaatggacgtaatagcttgatgaatcctggacctgctatggccagccacaaagaaggagaggaccgtttctttcctttgtctggatctttaatttttggcaaacaaggaactggaagagacaacgtggatgcggacaaagtcatgataaccaacgaagaagaaattaaaactactaacccggtagcaacggagtcctatggacaagtggccacaaaccaccagagtgcccaagcacaggcgcagaccggctgggttcaaaaccaaggaatacttccgggtatggtttggcaggacagagatgtgtacctgcaaggacccatttgggccaaaattcctcacacggacggcaactttcacccttctccgctgatgggagggtttggaatgaagcacccgcctcctcagatcctcatcaaaaacacacctgtacctgcggatcctccaacggccttcaacaaggacaagctgaactctttcatcacccagtattctactggccaagtcagcgtggagatcgagtgggagctgcagaaggaaaacagcaagcgctggaacccggagatccagtacacttccaactattacaagtctaataatgttgaatttgctgttaatactgaaggtgtatatagtgaaccccgccccattggcacgcggtatttaacgaggaactta

SEQ ID NO: 30 - DNA, 2226 bp, synthetic construct
  source 1..2226: mol_type = other DNA
atggctgccgatggttatcttccagattggctcgaggacaaccttagtgaaggaattcgcgagtggtgggctttgaaacctggagcccctcaacccaaggcaaatcaacaacatcaagacaacgctcgaggtcttgtgcttccgggttacaaataccttggacccggcaacggactcgacaagggggagccggtcaacgcagcagacgcggcggccctcgagcacgacaaggcctacgaccagcagctcaaggccggagacaacccgtacctcaagtacaaccacgccgacgccgagttccaggagcggctcaaagaagatacgtcttttgggggcaacctcgggcgagcagtcttccaggccaaaaagaggcttcttgaacctcttggtctggttgaggaagcggctaagacggctcctggaaagaagaggcctgtagagcagtctcctcaggaaccggactcctccgcgggtattggcaaatcgggtgcacagcccgctaaaaagagactcaatttcggtcagactggcgacacagagtcagtcccagaccctcaaccaatcggagaacctcccgcagccccctcaggtgtgggatctcttacaatggcttcaggtggtggcgcaccagtggcagacaataacgaaggtgccgatggagtgggtagttcctcgggaaattggcattgcgattcccaatggctgggggacagagtcatcaccaccagcacccgaacctgggccctgcccacctacaacaatcacctctacaagcaaatctccaacagcacatctggaggatcttcaaatgacaacgcctacttcggctacagcaccccctgggggtattttgacttcaacagattccactgccacttctcaccacgtgactggcagcgactcatcaacaacaactggggattccggcctaagcgactcaacttcaagctcttcaacattcaggtcaaagaggttacggacaacaatggagtcaagaccatcgccaataaccttaccagcacggtccaggtcttcacggactcagactatcagctcccgtacgtgctcgggtcggctcacgagggctgcctcccgccgttcccagcggacgttttcatgattcctcagtacgggtatctgacgcttaatgatggaagccaggccgtgggtcgttcgtccttttactgcctggaatatttcccgtcgcaaatgctaagaacgggtaacaacttccagttcagctacgagtttgagaacgtacctttccatagcagctacgctcacagccaaagcctggaccgactaatgaatccactcatcgatcagtatctgtattacttgagtaagacgattaatggtcatgattctccgcattctaaggcgcagaatcagcagtctttgaagttttcggtagctggtcctagcaacatggctgtccagggaagaaactacatacctggacccagctaccgacaacaacgtgtctcaaccactgtgactcaaaacaacaacagcgaatttgcttggcctggagcttcttcttgggctctcaatggacgtaatagcttgatgaatcctggacctgctatggccagccacaaagaaggagaggaccgtttctttcctttgtctggatctttaatttttggcaaacaaggaactggaagagacaacgtggatgcggacaaagtcatgataaccaacgaagaagaaattaaaactactaacccggtagcaacggagtcctatggacaagtggccacaaaccaccagagtgcccaagcacaggcgcagaccggctgggttcaaaaccaaggaatacttccgggtatggtttggcaggacagagatgtgtacctgcaaggacccatttgggccaaaattcctcacacggacggcaactttcacccttctccgctgatgggagggtttggaatgaagcacccgcctcctcagatcctcatcaaaaacacacctgtacctgcggatcctccaacggccttcaacaaggacaagctgaactctttcatcacccagtattctactggccaagtcagcgtggagatcgagtgggagctgcagaaggaaaacagcaagcgctggaacccggagatccagtacacttccaactattacaagtctaataatgttgaatttgctgttaatactgaaggtgtatatagtgaaccccgccccattggcacgcggtatttaacgaggaactta

SEQ ID NO: 31 - DNA, 2226 bp, synthetic construct
  source 1..2226: mol_type = other DNA
atggctgccgatggttatcttccagattggctcgaggacaaccttagtgaaggaattcgcgagtggtgggctttgaaacctggagcccctcaacccaaggcaaatcaacaacatcaagacaacgctcgaggtcttgtgcttccgggttacaaataccttggacccggcaacggactcgacaagggggagccggtcaacgcagcagacgcggcggccctcgagcacgacaaggcctacgaccagcagctcaaggccggagacaacccgtacctcaagtacaaccacgccgacgccgagttccaggagcggctcaaagaagatacgtcttttgggggcaacctcgggcgagcagtcttccaggccaaaaagaggcttcttgaacctcttggtctggttgaggaagcggctaagacggctcctggaaagaagaggcctgtagagcagtctcctcaggaaccggactcctccgcgggtattggcaaatcgggtgcacagcccgctaaaaagagactcaatttcggtcagactggcgacacagagtcagtcccagaccctcaaccaatcggagaacctcccgcagccccctcaggtgtgggatctcttacaatggcttcaggtggtggcgcaccagtggcagacaataacgaaggtgccgatggagtgggtagttcctcgggaaattggcattgcgattcccaatggctgggggacagagtcatcaccaccagcacccgaacctgggccctgcccacctacaacaatcacctctacaagcaaatctccaacagcacatctggaggatcttcaaatgacaacgcctacttcggctacagcaccccctgggggtattttgacttcaacagattccactgccacttctcaccacgtgactggcagcgactcatcaacaacaactggggattccggcctaagcgactcaacttcaagctcttcaacattcaggtcaaagaggttacggacaacaatggagtcaagaccatcgccaataaccttaccagcacggtccaggtcttcacggactcagactatcagctcccgtacgtgctcgggtcggctcacgagggctgcctcccgccgttcccagcggacgttttcatgattcctcagtacgggtatctgacgcttaatgatggaagccaggccgtgggtcgttcgtccttttactgcctggaatatttcccgtcgcaaatgctaagaacgggtaacaacttccagttcagctacgagtttgagaacgtacctttccatagcagctacgctcacagccaaagcctggaccgactaatgaatccactcatcgatcagtatctgtattacttgagtaagacgattaatggtcatgattctccgcattctaaggcgcagaatcagcagattttgaagttttcggtagctggtcctagcaacatggctgtccagggaagaaactacatacctggacccagctaccgacaacaacgtgtctcaaccactgtgactcaaaacaacaacagcgaatttgcttggcctggagcttcttcttgggctctcaatggacgtaatagcttgatgaatcctggacctgctatggccagccacaaagaaggagaggaccgtttctttcctttgtctggatctttaatttttggcaaacaaggaactggaagagacaacgtggatgcggacaaagtcatgataaccaacgaagaagaaattaaaactactaacccggtagcaacggagtcctatggacaagtggccacaaaccaccagagtgcccaagcacaggcgcagaccggctgggttcaaaaccaaggaatacttccgggtatggtttggcaggacagagatgtgtacctgcaaggacccatttgggccaaaattcctcacacggacggcaactttcacccttctccgctgatgggagggtttggaatgaagcacccgcctcctcagatcctcatcaaaaacacacctgtacctgcggatcctccaacggccttcaacaaggacaagctgaactctttcatcacccagtattctactggccaagtcagcgtggagatcgagtgggagctgcagaaggaaaacagcaagcgctggaacccggagatccagtacacttccaactattacaagtctaataatgttgaatttgctgttaatactgaaggtgtatatagtgaaccccgccccattggcacgcggtatttaacgaggaactta

SEQ ID NO: 32 - DNA, 2226 bp, synthetic construct
  source 1..2226: mol_type = other DNA
atggctgccgatggttatcttccagattggctcgaggacaaccttagtgaaggaattcgcgagtggtgggctttgaaacctggagcccctcaacccaaggcaaatcaacaacatcaagacaacgctcgaggtcttgtgcttccgggttacaaataccttggacccggcaacggactcgacaagggggagccggtcaacgcagcagacgcggcggccctcgagcacgacaaggcctacgaccagcagctcaaggccggagacaacccgtacctcaagtacaaccacgccgacgccgagttccaggagcggctcaaagaagatacgtcttttgggggcaacctcgggcgagcagtcttccaggccaaaaagaggcttcttgaacctcttggtctggttgaggaagcggctaagacggctcctggaaagaagaggcctgtagagcagtctcctcaggaaccggactcctccgcgggtattggcaaatcgggtgcacagcccgctaaaaagagactcaatttcggtcagactggcgacacagagtcagtcccagaccctcaaccaatcggagaacctcccgcagccccctcaggtgtgggatctcttacaatggcttcaggtggtggcgcaccagtggcagacaataacgaaggtgccgatggagtgggtagttcctcgggaaattggcattgcgattcccaatggctgggggacagagtcatcaccaccagcacccgaacctgggccctgcccacctacaacaatcacctctacaagcaaatctccaacagcacatctggaggatcttcaaatgacaacgcctacttcggctacagcaccccctgggggtattttgacttcaacagattccactgccacttctcaccacgtgactggcagcgactcatcaacaacaactggggattccggcctaagcgactcaacttcaagctcttcaacattcaggtcaaagaggttacggacaacaatggagtcaagaccatcgccaataaccttaccagcacggtccaggtcttcacggactcagactatcagctcccgtacgtgctcgggtcggctcacgagggctgcctcccgccgttcccagcggacgttttcatgattcctcagtacgggtatctgacgcttaatgatggaagccaggccgtgggtcgttcgtccttttactgcctggaatatttcccgtcgcaaatgctaagaacgggtaacaacttccagttcagctacgagtttgagaacgtacctttccatagcagctacgctcacagccaaagcctggaccgactaatgaatccactcatcgatcagtatctgtattacttgagtaagacgattaatggttctggttctccgcattttacgcgtcagaatcagcagacgttgaagttttcggtagctggtcctagcaacatggctgtccagggaagaaactacatacctggacccagctaccgacaacaacgtgtctcaaccactgtgactcaaaacaacaacagcgaatttgcttggcctggagcttcttcttgggctctcaatggacgtaatagcttgatgaatcctggacctgctatggccagccacaaagaaggagaggaccgtttctttcctttgtctggatctttaatttttggcaaacaaggaactggaagagacaacgtggatgcggacaaagtcatgataaccaacgaagaagaaattaaaactactaacccggtagcaacggagtcctatggacaagtggccacaaaccaccagagtgcccaagcacaggcgcagaccggctgggttcaaaaccaaggaatacttccgggtatggtttggcaggacagagatgtgtacctgcaaggacccatttgggccaaaattcctcacacggacggcaactttcacccttctccgctgatgggagggtttggaatgaagcacccgcctcctcagatcctcatcaaaaacacacctgtacctgcggatcctccaacggccttcaacaaggacaagctgaactctttcatcacccagtattctactggccaagtcagcgtggagatcgagtgggagctgcagaaggaaaacagcaagcgctggaacccggagatccagtacacttccaactattacaagtctaataatgttgaatttgctgttaatactgaaggtgtatatagtgaaccccgccccattggcacgcggtatttaacgaggaactta

SEQ ID NO: 33 - DNA, 2226 bp, synthetic construct
  source 1..2226: mol_type = other DNA
atggctgccgatggttatcttccagattggctcgaggacaaccttagtgaaggaattcgcgagtggtgggctttgaaacctggagcccctcaacccaaggcaaatcaacaacatcaagacaacgctcgaggtcttgtgcttccgggttacaaataccttggacccggcaacggactcgacaagggggagccggtcaacgcagcagacgcggcggccctcgagcacgacaaggcctacgaccagcagctcaaggccggagacaacccgtacctcaagtacaaccacgccgacgccgagttccaggagcggctcaaagaagatacgtcttttgggggcaacctcgggcgagcagtcttccaggccaaaaagaggcttcttgaacctcttggtctggttgaggaagcggctaagacggctcctggaaagaagaggcctgtagagcagtctcctcaggaaccggactcctccgcgggtattggcaaatcgggtgcacagcccgctaaaaagagactcaatttcggtcagactggcgacacagagtcagtcccagaccctcaaccaatcggagaacctcccgcagccccctcaggtgtgggatctcttacaatggcttcaggtggtggcgcaccagtggcagacaataacgaaggtgccgatggagtgggtagttcctcgggaaattggcattgcgattcccaatggctgggggacagagtcatcaccaccagcacccgaacctgggccctgcccacctacaacaatcacctctacaagcaaatctccaacagcacatctggaggatcttcaaatgacaacgcctacttcggctacagcaccccctgggggtattttgacttcaacagattccactgccacttctcaccacgtgactggcagcgactcatcaacaacaactggggattccggcctaagcgactcaacttcaagctcttcaacattcaggtcaaagaggttacggacaacaatggagtcaagaccatcgccaataaccttaccagcacggtccaggtcttcacggactcagactatcagctcccgtacgtgctcgggtcggctcacgagggctgcctcccgccgttcccagcggacgttttcatgattcctcagtacgggtatctgacgcttaatgatggaagccaggccgtgggtcgttcgtccttttactgcctggaatatttcccgtcgcaaatgctaagaacgggtaacaacttccagttcagctacgagtttgagaacgtacctttccatagcagctacgctcacagccaaagcctggaccgactaatgaatccactcatcgatcagtatctgtattacttgagtaagacgtctaatggtcatgattctccgcattctaaggcgcagaatcagcagacgttgaagttttcggtagctggtcctagcaacatggctgtccagggaagaaactacatacctggacccagctaccgacaacaacgtgtctcaaccactgtgactcaaaacaacaacagcgaatttgcttggcctggagcttcttcttgggctctcaatggacgtaatagcttgatgaatcctggacctgctatggccagccacaaagaaggagaggaccgtttctttcctttgtctggatctttaatttttggcaaacaaggaactggaagagacaacgtggatgcggacaaagtcatgataaccaacgaagaagaaattaaaactactaacccggtagcaacggagtcctatggacaagtggccacaaaccaccagagtgcccaagcacaggcgcagaccggctgggttcaaaaccaaggaatacttccgggtatggtttggcaggacagagatgtgtacctgcaaggacccatttgggccaaaattcctcacacggacggcaactttcacccttctccgctgatgggagggtttggaatgaagcacccgcctcctcagatcctcatcaaaaacacacctgtacctgcggatcctccaacggccttcaacaaggacaagctgaactctttcatcacccagtattctactggccaagtcagcgtggagatcgagtgggagctgcagaaggaaaacagcaagcgctggaacccggagatccagtacacttccaactattacaagtctaataatgttgaatttgctgttaatactgaaggtgtatatagtgaaccccgccccattggcacgcggtatttaacgaggaactta

SEQ ID NO: 34 - DNA, 2226 bp, synthetic construct
  source 1..2226: mol_type = other DNA
atggctgccgatggttatcttccagattggctcgaggacaaccttagtgaaggaattcgcgagtggtgggctttgaaacctggagcccctcaacccaaggcaaatcaacaacatcaagacaacgctcgaggtcttgtgcttccgggttacaaataccttggacccggcaacggactcgacaagggggagccggtcaacgcagcagacgcggcggccctcgagcacgacaaggcctacgaccagcagctcaaggccggagacaacccgtacctcaagtacaaccacgccgacgccgagttccaggagcggctcaaagaagatacgtcttttgggggcaacctcgggcgagcagtcttccaggccaaaaagaggcttcttgaacctcttggtctggttgaggaagcggctaagacggctcctggaaagaagaggcctgtagagcagtctcctcaggaaccggactcctccgcgggtattggcaaatcgggtgcacagcccgctaaaaagagactcaatttcggtcagactggcgacacagagtcagtcccagaccctcaaccaatcggagaacctcccgcagccccctcaggtgtgggatctcttacaatggcttcaggtggtggcgcaccagtggcagacaataacgaaggtgccgatggagtgggtagttcctcgggaaattggcattgcgattcccaatggctgggggacagagtcatcaccaccagcacccgaacctgggccctgcccacctacaacaatcacctctacaagcaaatctccaacagcacatctggaggatcttcaaatgacaacgcctacttcggctacagcaccccctgggggtattttgacttcaacagattccactgccacttctcaccacgtgactggcagcgactcatcaacaacaactggggattccggcctaagcgactcaacttcaagctcttcaacattcaggtcaaagaggttacggacaacaatggagtcaagaccatcgccaataaccttaccagcacggtccaggtcttcacggactcagactatcagctcccgtacgtgctcgggtcggctcacgagggctgcctcccgccgttcccagcggacgttttcatgattcctcagtacgggtatctgacgcttaatgatggaagccaggccgtgggtcgttcgtccttttactgcctggaatatttcccgtcgcaaatgctaagaacgggtaacaacttccagttcagctacgagtttgagaacgtacctttccatagcagctacgctcacagccaaagcctggaccgactaatgaatccactcatcgatcagtatctgtattacttgagtaagacgattaatggttctggttctccgcattctctgccgtggaatcagcagacgttgaagttttcggtagctggtcctagcaacatggctgtccagggaagaaactacatacctggacccagctaccgacaacaacgtgtctcaaccactgtgactcaaaacaacaacagcgaatttgcttggcctggagcttcttcttgggctctcaatggacgtaatagcttgatgaatcctggacctgctatggccagccacaaagaaggagaggaccgtttctttcctttgtctggatctttaatttttggcaaacaaggaactggaagagacaacgtggatgcggacaaagtcatgataaccaacgaagaagaaattaaaactactaacccggtagcaacggagtcctatggacaagtggccacaaaccaccagagtgcccaagcacaggcgcagaccggctgggttcaaaaccaaggaatacttccgggtatggtttggcaggacagagatgtgtacctgcaaggacccatttgggccaaaattcctcacacggacggcaactttcacccttctccgctgatgggagggtttggaatgaagcacccgcctcctcagatcctcatcaaaaacacacctgtacctgcggatcctccaacggccttcaacaaggacaagctgaactctttcatcacccagtattctactggccaagtcagcgtggagatcgagtgggagctgcagaaggaaaacagcaagcgctggaacccggagatccagtacacttccaactattacaagtctaataatgttgaatttgctgttaatactgaaggtgtatatagtgaaccccgccccattggcacgcggtatttaacgaggaactta

SEQ ID NO: 35 - DNA, 2226 bp, synthetic construct
  source 1..2226: mol_type = other DNA
atggctgccgatggttatcttccagattggctcgaggacaaccttagtgaaggaattcgcgagtggtgggctttgaaacctggagcccctcaacccaaggcaaatcaacaacatcaagacaacgctcgaggtcttgtgcttccgggttacaaataccttggacccggcaacggactcgacaagggggagccggtcaacgcagcagacgcggcggccctcgagcacgacaaggcctacgaccagcagctcaaggccggagacaacccgtacctcaagtacaaccacgccgacgccgagttccaggagcggctcaaagaagatacgtcttttgggggcaacctcgggcgagcagtcttccaggccaaaaagaggcttcttgaacctcttggtctggttgaggaagcggctaagacggctcctggaaagaagaggcctgtagagcagtctcctcaggaaccggactcctccgcgggtattggcaaatcgggtgcacagcccgctaaaaagagactcaatttcggtcagactggcgacacagagtcagtcccagaccctcaaccaatcggagaacctcccgcagccccctcaggtgtgggatctcttacaatggcttcaggtggtggcgcaccagtggcagacaataacgaaggtgccgatggagtgggtagttcctcgggaaattggcattgcgattcccaatggctgggggacagagtcatcaccaccagcacccgaacctgggccctgcccacctacaacaatcacctctacaagcaaatctccaacagcacatctggaggatcttcaaatgacaacgcctacttcggctacagcaccccctgggggtattttgacttcaacagattccactgccacttctcaccacgtgactggcagcgactcatcaacaacaactggggattccggcctaagcgactcaacttcaagctcttcaacattcaggtcaaagaggttacggacaacaatggagtcaagaccatcgccaataaccttaccagcacggtccaggtcttcacggactcagactatcagctcccgtacgtgctcgggtcggctcacgagggctgcctcccgccgttcccagcggacgttttcatgattcctcagtacgggtatctgacgcttaatgatggaagccaggccgtgggtcgttcgtccttttactgcctggaatatttcccgtcgcaaatgctaagaacgggtaacaacttccagttcagctacgagtttgagaacgtacctttccatagcagctacgctcacagccaaagcctggaccgactaatgaatccactcatcgatcagtatctgtattacttgagtaagacgattaatggtcatgattctccgcattctaaggcgcagaatcatcagacgttgaagttttcggtagctggtcctagcaacatggctgtccagggaagaaactacatacctggacccagctaccgacaacaacgtgtctcaaccactgtgactcaaaacaacaacagcgaatttgcttggcctggagcttcttcttgggctctcaatggacgtaatagcttgatgaatcctggacctgctatggccagccacaaagaaggagaggaccgtttctttcctttgtctggatctttaatttttggcaaacaaggaactggaagagacaacgtggatgcggacaaagtcatgataaccaacgaagaagaaattaaaactactaacccggtagcaacggagtcctatggacaagtggccacaaaccaccagagtgcccaagcacaggcgcagaccggctgggttcaaaaccaaggaatacttccgggtatggtttggcaggacagagatgtgtacctgcaaggacccatttgggccaaaattcctcacacggacggcaactttcacccttctccgctgatgggagggtttggaatgaagcacccgcctcctcagatcctcatcaaaaacacacctgtacctgcggatcctccaacggccttcaacaaggacaagctgaactctttcatcacccagtattctactggccaagtcagcgtggagatcgagtgggagctgcagaaggaaaacagcaagcgctggaacccggagatccagtacacttccaactattacaagtctaataatgttgaatttgctgttaatactgaaggtgtatatagtgaaccccgccccattggcacgcggtatttaacgaggaactta

SEQ ID NO: 36 - protein, 742 aa, synthetic construct
MAADGYLPDWLEDNLSEGIREWWALKPGAPQPKANQQHQDNARGLVLPGYKYLGPGNGLDKGEPVNAADAAALEHDKAYDQQLKAGDNPYLKYNHADAEFQERLKEDTSFGGNLGRAVFQAKKRLLEPLGLVEEAAKTAPGKKRPVEQSPQEPDSSAGIGKSGAQPAKKRLNFGQTGDTESVPDPQPIGEPPAAPSGVGSLTMASGGGAPVADNNEGADGVGSSSGNWHCDSQWLGDRVITTSTRTWALPTYNNHLYKQISNSTSGGSSNDNAYFGYSTPWGYFDFNRFHCHFSPRDWQRLINNNWGFRPKRLNFKLFNIQVKEVTDNNGVKTIANNLTSTVQVFTDSDYQLPYVLGSAHEGCLPPFPADVFMIPQYGYLTLNDGSQAVGRSSFYCLEYFPSQMLRTGNNFQFSYEFENVPFHSSYAHSQSLDRLMNPLIDQYLYYLSKTERVSGSPHSKAQNQQTLKFSVAGPSNMAVQGRNYIPGPSYRQQRVSTTVTQNNNSEFAWPGASSWALNGRNSLMNPGPAMASHKEGEDRFFPLSGSLIFGKQGTGRDNVDADKVMITNEEEIKTTNPVATESYGQVATNHQSAQAQAQTGWVQNQGILPGMVWQDRDVYLQGPIWAKIPHTDGNFHPSPLMGGFGMKHPPPQILIKNTPVPADPPTAFNKDKLNSFITQYSTGQVSVEIEWELQKENSKRWNPEIQYTSNYYKSNNVEFAVNTEGVYSEPRPIGTRYLTRNL

SEQ ID NO: 37 - protein, 742 aa, synthetic construct
MAADGYLPDWLEDNLSEGIREWWALKPGAPQPKANQQHQDNARGLVLPGYKYLGPGNGLDKGEPVNAADAAALEHDKAYDQQLKAGDNPYLKYNHADAEFQERLKEDTSFGGNLGRAVFQAKKRLLEPLGLVEEAAKTAPGKKRPVEQSPQEPDSSAGIGKSGAQPAKKRLNFGQTGDTESVPDPQPIGEPPAAPSGVGSLTMASGGGAPVADNNEGADGVGSSSGNWHCDSQWLGDRVITTSTRTWALPTYNNHLYKQISNSTSGGSSNDNAYFGYSTPWGYFDFNRFHCHFSPRDWQRLINNNWGFRPKRLNFKLFNIQVKEVTDNNGVKTIANNLTSTVQVFTDSDYQLPYVLGSAHEGCLPPFPADVFMIPQYGYLTLNDGSQAVGRSSFYCLEYFPSQMLRTGNNFQFSYEFENVPFHSSYAHSQSLDRLMNPLIDQYLYYLSKAEIGHDSPHKSGQNQQTLKFSVAGPSNMAVQGRNYIPGPSYRQQRVSTTVTQNNNSEFAWPGASSWALNGRNSLMNPGPAMASHKEGEDRFFPLSGSLIFGKQGTGRDNVDADKVMITNEEEIKTTNPVATESYGQVATNHQSAQAQAQTGWVQNQGILPGMVWQDRDVYLQGPIWAKIPHTDGNFHPSPLMGGFGMKHPPPQILIKNTPVPADPPTAFNKDKLNSLITQYSTGQVSVEIEWELQKENSKRWNPEIQYTSNYYKSNNVEFAVNTEGVYSEPRPIGTRYLTRNL

SEQ ID NO: 38 - protein, 742 aa, synthetic construct
MAADGYLPDWLEDNLSEGIREWWALKPGAPQPKANQQHQDNARGLVLPGYKYLGPGNGLDKGEPVNAADAAALEHDKAYDQQLKAGDNPYLKYNHADAEFQERLKEDTSFGGNLGRAVFQAKKRLLEPLGLVEEAAKTAPGKKRPVEQSPQEPDSSAGIGKSGAQPAKKRLNFGQTGDTESVPDPQPIGEPPAAPSGVGSLTMASGGGAPVADNNEGADGVGSSSGNWHCDSQWLGDRVITTSTRTWALPTYNNHLYKQISNSTSGGSSNDNAYFGYSTPWGYFDFNRFHCHFSPRDWQRLINNNWGFRPKRLNFKLFNIQVKEVTDNNGVKTIANNLTSTVQVFTDSDYQLPYVLGSAHEGCLPPFPADVFMIPQYGYLTLNDGSQAVGRSSFYCLEYFPSQMLRTGNNFQFSYEFENVPFHSSYAHSQSLDRLMNPLIDQYLYYLSKTIIGSGSPHSKAQNRHTLKFSVAGPSNMAVQGRNYIPGPSYRQQRVSTTVTQNNNSEFAWPGASSWALNGRNSLMNPGPAMASHKEGEDRFFPLSGSLIFGKQGTGRDNVDADKVMITNEEEIKTTNPVATESYGQVATNHQSAQAQAQTGWVQNQGILPGMVWQDRDVYLQGPIWAKIPHTDGNFHPSPLMGGFGMKHPPPQILIKNTPVPADPPTAFNKDKLNSFITQYSTGQVSVEIEWELQKENSKRWNPEIQYTSNYYKSNNVEFAVNTEGVYSEPRPIGTRYLTRNL

SEQ ID NO: 39 - protein, 742 aa, synthetic construct
MAADGYLPDWLEDNLSEGIREWWALKPGAPQPKANQQHQDNARGLVLPGYKYLGPGNGLDKGEPVNAADAAALEHDKAYDQQLKAGDNPYLKYNHADAEFQERLKEDTSFGGNLGRAVFQAKKRLLEPLGLVEEAAKTAPGKKRPVEQSPQEPDSSAGIGKSGAQPAKKRLNFGQTGDTESVPDPQPIGEPPAAPSGVGSLTMASGGGAPVADNNEGADGVGSSSGNWHCDSQWLGDRVITTSTRTWALPTYNNHLYKQISNSTSGGSSNDNAYFGYSTPWGYFDFNRFHCHFSPRDWQRLINNNWGFRPKRLNFKLFNIQVKEVTDNNGVKTIANNLTSTVQVFTDSDYQLPYVLGSAHEGCLPPFPADVFMIPQYGYLTLNDGSQAVGRSSFYCLEYFPSQMLRTGNNFQFSYEFENVPFHSSYAHSQSLDRLMNPLIDQYLYYLSKTEKMSGSPHSKAQNQQTLKFSVAGPSNMAVQGRNYIPGPSYRQQRVSTTVTQNNNSEFAWPGASSWALNGRNSLMNPGPAMASHKEGEDRFFPLSGSLIFGKQGTGRDNVDADKVMITNEEEIKTTNPVATESYGQVATNHQSAQAQAQTGWVQNQGILPGMVWQDRDVYLQGPIWAKIPHTDGNFHPSPLMGGFGMKHPPPQILIKNTPVPADPPTAFNKDKLNSFITQYSTGQVSVEIEWELQKENSKRWNPEIQYTSNYYKSNNVEFAVNTEGVYSEPRPIGTRYLTRNL

SEQ ID NO: 40 - protein, 742 aa, synthetic construct
MAADGYLPDWLEDNLSEGIREWWALKPGAPQPKANQQHQDNARGLVLPGYKYLGPGNGLDKGEPVNAADAAALEHDKAYDQQLKAGDNPYLKYNHADAEFQERLKEDTSFGGNLGRAVFQAKKRLLEPLGLVEEAAKTAPGKKRPVEQSPQEPDSSAGIGKSGAQPAKKRLNFGQTGDTESVPDPQPIGEPPAAPSGVGSLTMASGGGAPVADNNEGADGVGSSSGNWHCDSQWLGDRVITTSTRTWALPTYNNHLYKQISNSTSGGSSNDNAYFGYSTPWGYFDFNRFHCHFSPRDWQRLINNNWGFRPKRLNFKLFNIQVKEVTDNNGVKTIANNLTSTVQVFTDSDYQLPYVLGSAHEGCLPPFPADVFMIPQYGYLTLNDGSQAVGRSSFYCLEYFPSQMLRTGNNFQFSYEFENVPFHSSYAHSQSLDRLMNPLIDQYLYYLSKEINGRGSPHSKAQNQQTLKFSVAGPSNMAVQGRNYIPGPSYRQQRVSTTVTQNNNSEFAWPGASSWALNGRNSLMNPGPAMASHKEGEDRFFPLSGSLIFGKQGTGRDNVDADKVMITNEEEIKTTNPVATESYGQVATNHQSAQAQAQTGWVQNQGILPGMVWQDRDVYLQGPIWAKIPHTDGNFHPSPLMGGFGMKHPPPQILIKNTPVPADPPTAFNKDKLNSFITQYSTGQVSVEIEWELQKENSKRWNPEIQYTSNYYKSNNVEFAVNTEGVYSEPRPIGTRYLTRNL

SEQ ID NO: 41 - protein, 742 aa, synthetic construct
MAADGYLPDWLEDNLSEGIREWWALKPGAPQPKANQQHQDNARGLVLPGYKYLGPGNGLDKGEPVNAADAAALEHDKAYDQQLKAGDNPYLKYNHADAEFQERLKEDTSFGGNLGRAVFQAKKRLLEPLGLVEEAAKTAPGKKRPVEQSPQEPDSSAGIGKSGAQPAKKRLNFGQTGDTESVPDPQPIGEPPAAPSGVGSLTMASGGGAPVADNNEGADGVGSSSGNWHCDSQWLGDRVITTSTRTWALPTYNNHLYKQISNSTSGGSSNDNAYFGYSTPWGYFDFNRFHCHFSPRDWQRLINNNWGFRPKRLNFKLFNIQVKEVTDNNGVKTIANNLTSTVQVFTDSDYQLPYVLGSAHEGCLPPFPADVFMIPQYGYLTLNDGSQAVGRSSFYCLEYFPSQMLRTGNNFQFSYEFENVPFHSSYAHSQSLDRLMNPLIDQYLYYLSKTFNGSGSPHSKAPNLQTLKFSVAGPSNMAVQGRNYIPGPSYRQQRVSTTVTQNNNSEFAWPGASSWALNGRNSLMNPGPAMASHKEGEDRFFPLSGSLIFGKQGTGRDNVDADKVMITNEEEIKTTNPVATESYGQVATNHQSAQAQAQTGWVQNQGILPGMVWQDRDVYLQGPIWAKIPHTDGNFHPSPLMGGFGMKHPPPQILIKNTPVPADPPTAFNKDKLNSFITQYSTGQVSVEIEWELQKENSKRWNPEIQYTSNYYKSNNVEFAVNTEGVYSEPRPIGTRYLTRNL

SEQ ID NO: 42 - protein, 742 aa, synthetic construct
MAADGYLPDWLEDNLSEGIREWWALKPGAPQPKANQQHQDNARGLVLPGYKYLGPGNGLDKGEPVNAADAAALEHDKAYDQQLKAGDNPYLKYNHADAEFQERLKEDTSFGGNLGRAVFQAKKRLLEPLGLVEEAAKTAPGKKRPVEQSPQEPDSSAGIGKSGAQPAKKRLNFGQTGDTESVPDPQPIGEPPAAPSGVGSLTMASGGGAPVADNNEGADGVGSSSGNWHCDSQWLGDRVITTSTRTWALPTYNNHLYKQISNSTSGGSSNDNAYFGYSTPWGYFDFNRFHCHFSPRDWQRLINNNWGFRPKRLNFKLFNIQVKEVTDNNGVKTIANNLTSTVQVFTDSDYQLPYVLGSAHEGCLPPFPADVFMIPQYGYLTLNDGSQAVGRSSFYCLEYFPSQMLRTGNNFQFSYEFENVPFHSSYAHSQSLDRLMNPLIDQYLYYLSKTEKTSGSPHSKAQNQQTLKFSVAGPSNMAVQGRNYIPGPSYRQQRVSTTVTQNNNSEFAWPGASSWALNGRNSLMNPGPAMASHKEGEDRFFPLSGSLIFGKQGTGRDNVDADKVMITNEEEIKTTNPVATESYGQVATNHQSAQAQAQTGWVQNQGILPGMVWQDRDVYLQGPIWAKIPHTDGNFHPSPLMGGFGMKHPPPQILIKNTPVPADPPTAFNKDKLNSFITQYSTGQVSVEIEWELQKENSKRWNPEIQYTSNYYKSNNVEFAVNTEGVYSEPRPIGTRYLTRNL

SEQ ID NO: 43 - protein, 742 aa, synthetic construct
MAADGYLPDWLEDNLSEGIREWWALKPGAPQPKANQQHQDNARGLVLPGYKYLGPGNGLDKGEPVNAADAAALEHDKAYDQQLKAGDNPYLKYNHADAEFQERLKEDTSFGGNLGRAVFQAKKRLLEPLGLVEEAAKTAPGKKRPVEQSPQEPDSSAGIGKSGAQPAKKRLNFGQTGDTESVPDPQPIGEPPAAPSGVGSLTMASGGGAPVADNNEGADGVGSSSGNWHCDSQWLGDRVITTSTRTWALPTYNNHLYKQISNSTSGGSSNDNAYFGYSTPWGYFDFNRFHCHFSPRDWQRLINNNWGFRPKRLNFKLFNIQVKEVTDNNGVKTIANNLTSTVQVFTDSDYQLPYVLGSAHEGCLPPFPADVFMIPQYGYLTLNDGSQAVGRSSFYCLEYFPSQMLRTGNNFQFSYEFENVPFHSSYAHSQSLDRLMNPLIDQYLYYLSKTMNGHDSPHSKAQNQQTLKFSVAGPSNMAVQGRNYIPGPSYRQQRVSTTVTQNNNSEFAWPGASSWALNGRNSLMNPGPAMASHKEGEDRFFPLSGSLIFGKQGTGRDNVDADKVMITNEEEIKTTNPVATESYGQVATNHQSAQAQAQTGWVQNQGILPGMVWQDRDVYLQGPIWAKIPHTDGNFHPSPLMGGFGMKHPPPQILIKNTPVPADPPTAFNKDKLNSFITQYSTGQVSVEIEWELQKENSKRWNPEIQYTSNYYKSNNVEFAVNTEGVYSEPRPIGTRYLTRNL

SEQ ID NO: 44 - protein, 742 aa, synthetic construct
MAADGYLPDWLEDNLSEGIREWWALKPGAPQPKANQQHQDNARGLVLPGYKYLGPGNGLDKGEPVNAADAAALEHDKAYDQQLKAGDNPYLKYNHADAEFQERLKEDTSFGGNLGRAVFQAKKRLLEPLGLVEEAAKTAPGKKRPVEQSPQEPDSSAGIGKSGAQPAKKRLNFGQTGDTESVPDPQPIGEPPAAPSGVGSLTMASGGGAPVADNNEGADGVGSSSGNWHCDSQWLGDRVITTSTRTWALPTYNNHLYKQISNSTSGGSSNDNAYFGYSTPWGYFDFNRFHCHFSPRDWQRLINNNWGFRPKRLNFKLFNIQVKEVTDNNGVKTIANNLTSTVQVFTDSDYQLPYVLGSAHEGCLPPFPADVFMIPQYGYLTLNDGSQAVGRSSFYCLEYFPSQMLRTGNNFQFSYEFENVPFHSSYAHSQSLDRLMNPLIDQYLYYLSKTIDGHDSPHSKAQNQQTLKFSVAGPSNMAVQGRNYIPGPSYRQQRVSTTVTQNNNSEFAWPGASSWALNGRNSLMNPGPAMASHKEGEDRFFPLSGSLIFGKQGTGRDNVDADKVMITNEEEIKTTNPVATESYGQVATNHQSAQAQAQTGWVQNQGILPGMVWQDRDVYLQGPIWAKIPHTDGNFHPSPLMGGFGMKHPPPQILIKNTPVPADPPTAFNKDKLNSFITQYSTGQVSVEIEWELQKENSKRWNPEIQYTSNYYKSNNVEFAVNTEGVYSEPRPIGTRYLTRNL

SEQ ID NO: 45 - protein, 742 aa, synthetic construct
MAADGYLPDWLEDNLSEGIREWWALKPGAPQPKANQQHQDNARGLVLPGYKYLGPGNGLDKGEPVNAADAAALEHDKAYDQQLKAGDNPYLKYNHADAEFQERLKEDTSFGGNLGRAVFQAKKRLLEPLGLVEEAAKTAPGKKRPVEQSPQEPDSSAGIGKSGAQPAKKRLNFGQTGDTESVPDPQPIGEPPAAPSGVGSLTMASGGGAPVADNNEGADGVGSSSGNWHCDSQWLGDRVITTSTRTWALPTYNNHLYKQISNSTSGGSSNDNAYFGYSTPWGYFDFNRFHCHFSPRDWQRLINNNWGFRPKRLNFKLFNIQVKEVTDNNGVKTIANNLTSTVQVFTDSDYQLPYVLGSAHEGCLPPFPADVFMIPQYGYLTLNDGSQAVGRSSFYCLEYFPSQMLRTGNNFQFSYEFENVPFHSSYAHSQSLDRLMNPLIDQYLYYLSKTNNGHDSPHSKAQNQQTLKFSVAGPSNMAVQGRNYIPGPSYRQQRVSTTVTQNNNSEFAWPGASSWALNGRNSLMNPGPAMASHKEGEDRFFPLSGSLIFGKQGTGRDNVDADKVMITNEEEIKTTNPVATESYGQVATNHQSAQAQAQTGWVQNQGILPGMVWQDRDVYLQGPIWAKIPHTDGNFHPSPLMGGFGMKHPPPQILIKNTPVPADPPTAFNKDKLNSFITQYSTGQVSVEIEWELQKENSKRWNPEIQYTSNYYKSNNVEFAVNTEGVYSEPRPIGTRYLTRNL

SEQ ID NO: 46 - protein, 742 aa, synthetic construct
MAADGYLPDWLEDNLSEGIREWWALKPGAPQPKANQQHQDNARGLVLPGYKYLGPGNGLDKGEPVNAADAAALEHDKAYDQQLKAGDNPYLKYNHADAEFQERLKEDTSFGGNLGRAVFQAKKRLLEPLGLVEEAAKTAPGKKRPVEQSPQEPDSSAGIGKSGAQPAKKRLNFGQTGDTESVPDPQPIGEPPAAPSGVGSLTMASGGGAPVADNNEGADGVGSSSGNWHCDSQWLGDRVITTSTRTWALPTYNNHLYKQISNSTSGGSSNDNAYFGYSTPWGYFDFNRFHCHFSPRDWQRLINNNWGFRPKRLNFKLFNIQVKEVTDNNGVKTIANNLTSTVQVFTDSDYQLPYVLGSAHEGCLPPFPADVFMIPQYGYLTLNDGSQAVGRSSFYCLEYFPSQMLRTGNNFQFSYEFENVPFHSSYAHSQSLDRLMNPLIDQYLYYLSKTQRKSGSPHSKAQNQQTLKFSVAGPSNMAVQGRNYIPGPSYRQQRVSTTVTQNNNSEFAWPGASSWALNGRNSLMNPGPAMASHKEGEDRFFPLSGSLIFGKQGTGRDNVDADKVMITNEEEIKTTNPVATESYGQVATNHQSAQAQAQTGWVQNQGILPGMVWQDRDVYLQGPIWAKIPHTDGNFHPSPLMGGFGMKHPPPQILIKNTPVPADPPTAFNKDKLNSFITQYSTGQVSVEIEWELQKENSKRWNPEIQYTSNYYKSNNVEFAVNTEGVYSEPRPIGTRYLTRNL

SEQ ID NO: 47 - protein, 742 aa, synthetic construct
MAADGYLPDWLEDNLSEGIREWWALKPGAPQPKANQQHQDNARGLVLPGYKYLGPGNGLDKGEPVNAADAAALEHDKAYDQQLKAGDNPYLKYNHADAEFQERLKEDTSFGGNLGRAVFQAKKRLLEPLGLVEEAAKTAPGKKRPVEQSPQEPDSSAGIGKSGAQPAKKRLNFGQTGDTESVPDPQPIGEPPAAPSGVGSLTMASGGGAPVADNNEGADGVGSSSGNWHCDSQWLGDRVITTSTRTWALPTYNNHLYKQISNSTSGGSSNDNAYFGYSTPWGYFDFNRFHCHFSPRDWQRLINNNWGFRPKRLNFKLFNIQVKEVTDNNGVKTIANNLTSTVQVFTDSDYQLPYVLGSAHEGCLPPFPADVFMIPQYGYLTLNDGSQAVGRSSFYCLEYFPSQMLRTGNNFQFSYEFENVPFHSSYAHSQSLDRLMNPLIDQYLYYLSKTINGSGSPHSKAQARKTLKFSVAGPSNMAVQGRNYIPGPSYRQQRVSTTVTQNNNSEFAWPGASSWALNGRNSLMNPGPAMASHKEGEDRFFPLSGSLIFGKQGTGRDNVDADKVMITNEEEIKTTNPVATESYGQVATNHQSAQAQAQTGWVQNQGILPGMVWQDRDVYLQGPIWAKIPHTDGNFHPSPLMGGFGMKHPPPQILIKNTPVPADPPTAFNKDKLNSFITQYSTGQVSVEIEWELQKENSKRWNPEIQYTSNYYKSNNVEFAVNTEGVYSEPRPIGTRYLTRNL

SEQ ID NO: 48 - protein, 742 aa, synthetic construct
MAADGYLPDWLEDNLSEGIREWWALKPGAPQPKANQQHQDNARGLVLPGYKYLGPGNGLDKGEPVNAADAAALEHDKAYDQQLKAGDNPYLKYNHADAEFQERLKEDTSFGGNLGRAVFQAKKRLLEPLGLVEEAAKTAPGKKRPVEQSPQEPDSSAGIGKSGAQPAKKRLNFGQTGDTESVPDPQPIGEPPAAPSGVGSLTMASGGGAPVADNNEGADGVGSSSGNWHCDSQWLGDRVITTSTRTWALPTYNNHLYKQISNSTSGGSSNDNAYFGYSTPWGYFDFNRFHCHFSPRDWQRLINNNWGFRPKRLNFKLFNIQVKEVTDNNGVKTIANNLTSTVQVFTDSDYQLPYVLGSAHEGCLPPFPADVFMIPQYGYLTLNDGSQAVGRSSFYCLEYFPSQMLRTGNNFQFSYEFENVPFHSSYAHSQSLDRLMNPLIDQYLYYLSKYIVGSGSPHSKAQNQQTLKFSVAGPSNMAVQGRNYIPGPSYRQQRVSTTVTQNNNSEFAWPGASSWALNGRNSLMNPGPAMASHKEGEDRFFPLSGSLIFGKQGTGRDNVDADKVMITNEEEIKTTNPVATESYGQVATNHQSAQAQAQTGWVQNQGILPGMVWQDRDVYLQGPIWAKIPHTDGNFHPSPLMGGFGMKHPPPQILIKNTPVPADPPTAFNKDKLNSFITQYSTGQVSVEIEWELQKENSKRWNPEIQYTSNYYKSNNVEFAVNTEGVYSEPRPIGTRYLTRNL

SEQ ID NO: 49 - protein, 742 aa, synthetic construct
MAADGYLPDWLEDNLSEGIREWWALKPGAPQPKANQQHQDNARGLVLPGYKYLGPGNGLDKGEPVNAADAAALEHDKAYDQQLKAGDNPYLKYNHADAEFQERLKEDTSFGGNLGRAVFQAKKRLLEPLGLVEEAAKTAPGKKRPVEQSPQEPDSSAGIGKSGAQPAKKRLNFGQTGDTESVPDPQPIGEPPAAPSGVGSLTMASGGGAPVADNNEGADGVGSSSGNWHCDSQWLGDRVITTSTRTWALPTYNNHLYKQISNSTSGGSSNDNAYFGYSTPWGYFDFNRFHCHFSPRDWQRLINNNWGFRPKRLNFKLFNIQVKEVTDNNGVKTIANNLTSTVQVFTDSDYQLPYVLGSAHEGCLPPFPADVFMIPQYGYLTLNDGSQAVGRSSFYCLEYFPSQMLRTGNNFQFSYEFENVPFHSSYAHSQSLDRLMNPLIDQYLYYLSKTISKRGSPHSKAQNQQTLKFSVAGPSNMAVQGRNYIPGPSYRQQRVSTTVTQNNNSEFAWPGASSWALNGRNSLMNPGPAMASHKEGEDRFFPLSGSLIFGKQGTGRDNVDADKVMITNEEEIKTTNPVATESYGQVATNHQSAQAQAQTGWVQNQGILPGMVWQDRDVYLQGPIWAKIPHTDGNFHPSPLMGGFGMKHPPPQILIKNTPVPADPPTAFNKDKLNSFITQYSTGQVSVEIEWELQKENSKRWNPEIQYTSNYYKSNNVEFAVNTEGVYSEPRPIGTRYLTRNL

SEQ ID NO: 50 - protein, 742 aa, synthetic construct
MAADGYLPDWLEDNLSEGIREWWALKPGAPQPKANQQHQDNARGLVLPGYKYLGPGNGLDKGEPVNAADAAALEHDKAYDQQLKAGDNPYLKYNHADAEFQERLKEDTSFGGNLGRAVFQAKKRLLEPLGLVEEAAKTAPGKKRPVEQSPQEPDSSAGIGKSGAQPAKKRLNFGQTGDTESVPDPQPIGEPPAAPSGVGSLTMASGGGAPVADNNEGADGVGSSSGNWHCDSQWLGDRVITTSTRTWALPTYNNHLYKQISNSTSGGSSNDNAYFGYSTPWGYFDFNRFHCHFSPRDWQRLINNNWGFRPKRLNFKLFNIQVKEVTDNNGVKTIANNLTSTVQVFTDSDYQLPYVLGSAHEGCLPPFPADVFMIPQYGYLTLNDGSQAVGRSSFYCLEYFPSQMLRTGNNFQFSYEFENVPFHSSYAHSQSLDRLMNPLIDQYLYYLSKGLGGSGSPHSKAQNQQTLKFSVAGPSNMAVQGRNYIPGPSYRQQRVSTTVTQNNNSEFAWPGASSWALNGRNSLMNPGPAMASHKEGEDRFFPLSGSLIFGKQGTGRDNVDADKVMITNEEEIKTTNPVATESYGQVATNHQSAQAQAQTGWVQNQGILPGMVWQDRDVYLQGPIWAKIPHTDGNFHPSPLMGGFGMKHPPPQILIKNTPVPADPPTAFNKDKLNSFITQYSTGQVSVEIEWELQKENSKRWNPEIQYTSNYYKSNNVEFAVNTEGVYSEPRPIGTRYLTRNL

SEQ ID NO: 51 - protein, 742 aa, synthetic construct
MAADGYLPDWLEDNLSEGIREWWALKPGAPQPKANQQHQDNARGLVLPGYKYLGPGNGLDKGEPVNAADAAALEHDKAYDQQLKAGDNPYLKYNHADAEFQERLKEDTSFGGNLGRAVFQAKKRLLEPLGLVEEAAKTAPGKKRPVEQSPQEPDSSAGIGKSGAQPAKKRLNFGQTGDTESVPDPQPIGEPPAAPSGVGSLTMASGGGAPVADNNEGADGVGSSSGNWHCDSQWLGDRVITTSTRTWALPTYNNHLYKQISNSTSGGSSNDNAYFGYSTPWGYFDFNRFHCHFSPRDWQRLINNNWGFRPKRLNFKLFNIQVKEVTDNNGVKTIANNLTSTVQVFTDSDYQLPYVLGSAHEGCLPPFPADVFMIPQYGYLTLNDGSQAVGRSSFYCLEYFPSQMLRTGNNFQFSYEFENVPFHSSYAHSQSLDRLMNPLIDQYLYYLSKTINGHDSPHSKAQNLQTLKFSVAGPSNMAVQGRNYIPGPSYRQQRVSTTVTQNNNSEFAWPGASSWALNGRNSLMNPGPAMASHKEGEDRFFPLSGSLIFGKQGTGRDNVDADKVMITNEEEIKTTNPVATESYGQVATNHQSAQAQAQTGWVQNQGILPGMVWQDRDVYLQGPIWAKIPHTDGNFHPSPLMGGFGMKHPPPQILIKNTPVPADPPTAFNKDKLNSFITQYSTGQVSVEIEWELQKENSKRWNPEIQYTSNYYKSNNVEFAVNTEGVYSEPRPIGTRYLTRNL

SEQ ID NO: 52 - protein, 742 aa, synthetic construct
MAADGYLPDWLEDNLSEGIREWWALKPGAPQPKANQQHQDNARGLVLPGYKYLGPGNGLDKGEPVNAADAAALEHDKAYDQQLKAGDNPYLKYNHADAEFQERLKEDTSFGGNLGRAVFQAKKRLLEPLGLVEEAAKTAPGKKRPVEQSPQEPDSSAGIGKSGAQPAKKRLNFGQTGDTESVPDPQPIGEPPAAPSGVGSLTMASGGGAPVADNNEGADGVGSSSGNWHCDSQWLGDRVITTSTRTWALPTYNNHLYKQISNSTSGGSSNDNAYFGYSTPWGYFDFNRFHCHFSPRDWQRLINNNWGFRPKRLNFKLFNIQVKEVTDNNGVKTIANNLTSTVQVFTDSDYQLPYVLGSAHEGCLPPFPADVFMIPQYGYLTLNDGSQAVGRSSFYCLEYFPSQMLRTGNNFQFSYEFENVPFHSSYAHSQSLDRLMNPLIDQYLYYLSKTVNGHDSPHSKAQNQQTLKFSVAGPSNMAVQGRNYIPGPSYRQQRVSTTVTQNNNSEFAWPGASSWALNGRNSLMNPGPAMASHKEGEDRFFPLSGSLIFGKQGTGRDNVDADKVMITNEEEIKTTNPVATESYGQVATNHQSAQAQAQTGWVQNQGILPGMVWQDRDVYLQGPIWAKIPHTDGNFHPSPLMGGFGMKHPPPQILIKNTPVPADPPTAFNKDKLNSFITQYSTGQVSVEIEWELQKENSKRWNPEIQYTSNYYKSNNVEFAVNTEGVYSEPRPIGTRYLTRNL

SEQ ID NO: 53 - protein, 742 aa, synthetic construct
MAADGYLPDWLEDNLSEGIREWWALKPGAPQPKANQQHQDNARGLVLPGYKYLGPGNGLDKGEPVNAADAAALEHDKAYDQQLKAGDNPYLKYNHADAEFQERLKEDTSFGGNLGRAVFQAKKRLLEPLGLVEEAAKTAPGKKRPVEQSPQEPDSSAGIGKSGAQPAKKRLNFGQTGDTESVPDPQPIGEPPAAPSGVGSLTMASGGGAPVADNNEGADGVGSSSGNWHCDSQWLGDRVITTSTRTWALPTYNNHLYKQISNSTSGGSSNDNAYFGYSTPWGYFDFNRFHCHFSPRDWQRLINNNWGFRPKRLNFKLFNIQVKEVTDNNGVKTIANNLTSTVQVFTDSDYQLPYVLGSAHEGCLPPFPADVFMIPQYGYLTLNDGSQAVGRSSFYCLEYFPSQMLRTGNNFQFSYEFENVPFHSSYAHSQSLDRLMNPLIDQYLYYLSKTINGHDSPHSKALNQQTLKFSVAGPSNMAVQGRNYIPGPSYRQQRVSTTVTQNNNSEFAWPGASSWALNGRNSLMNPGPAMASHKEGEDRFFPLSGSLIFGKQGTGRDNVDADKVMITNEEEIKTTNPVATESYGQVATNHQSAQAQAQTGWVQNQGILPGMVWQDRDVYLQGPIWAKIPHTDGNFHPSPLMGGFGMKHPPPQILIKNTPVPADPPTAFNKDKLNSFITQYSTGQVSVEIEWELQKENSKRWNPEIQYTSNYYKSNNVEFAVNTEGVYSEPRPIGTRYLTRNL

SEQ ID NO: 54 - protein, 742 aa, synthetic construct
MAADGYLPDWLEDNLSEGIREWWALKPGAPQPKANQQHQDNARGLVLPGYKYLGPGNGLDKGEPVNAADAAALEHDKAYDQQLKAGDNPYLKYNHADAEFQERLKEDTSFGGNLGRAVFQAKKRLLEPLGLVEEAAKTAPGKKRPVEQSPQEPDSSAGIGKSGAQPAKKRLNFGQTGDTESVPDPQPIGEPPAAPSGVGSLTMASGGGAPVADNNEGADGVGSSSGNWHCDSQWLGDRVITTSTRTWALPTYNNHLYKQISNSTSGGSSNDNAYFGYSTPWGYFDFNRFHCHFSPRDWQRLINNNWGFRPKRLNFKLFNIQVKEVTDNNGVKTIANNLTSTVQVFTDSDYQLPYVLGSAHEGCLPPFPADVFMIPQYGYLTLNDGSQAVGRSSFYCLEYFPSQMLRTGNNFQFSYEFENVPFHSSYAHSQSLDRLMNPLIDQYLYYLSKTINGHDSPHSKAQNQQSLKFSVAGPSNMAVQGRNYIPGPSYRQQRVSTTVTQNNNSEFAWPGASSWALNGRNSLMNPGPAMASHKEGEDRFFPLSGSLIFGKQGTGRDNVDADKVMITNEEEIKTTNPVATESYGQVATNHQSAQAQAQTGWVQNQGILPGMVWQDRDVYLQGPIWAKIPHTDGNFHPSPLMGGFGMKHPPPQILIKNTPVPADPPTAFNKDKLNSFITQYSTGQVSVEIEWELQKENSKRWNPEIQYTSNYYKSNNVEFAVNTEGVYSEPRPIGTRYLTRNL

SEQ ID NO: 55 - protein, 742 aa, synthetic construct
MAADGYLPDWLEDNLSEGIREWWALKPGAPQPKANQQHQDNARGLVLPGYKYLGPGNGLDKGEPVNAADAAALEHDKAYDQQLKAGDNPYLKYNHADAEFQERLKEDTSFGGNLGRAVFQAKKRLLEPLGLVEEAAKTAPGKKRPVEQSPQEPDSSAGIGKSGAQPAKKRLNFGQTGDTESVPDPQPIGEPPAAPSGVGSLTMASGGGAPVADNNEGADGVGSSSGNWHCDSQWLGDRVITTSTRTWALPTYNNHLYKQISNSTSGGSSNDNAYFGYSTPWGYFDFNRFHCHFSPRDWQRLINNNWGFRPKRLNFKLFNIQVKEVTDNNGVKTIANNLTSTVQVFTDSDYQLPYVLGSAHEGCLPPFPADVFMIPQYGYLTLNDGSQAVGRSSFYCLEYFPSQMLRTGNNFQFSYEFENVPFHSSYAHSQSLDRLMNPLIDQYLYYLSKTINGHDSPHSKAQNQQILKFSVAGPSNMAVQGRNYIPGPSYRQQRVSTTVTQNNNSEFAWPGASSWALNGRNSLMNPGPAMASHKEGEDRFFPLSGSLIFGKQGTGRDNVDADKVMITNEEEIKTTNPVATESYGQVATNHQSAQAQAQTGWVQNQGILPGMVWQDRDVYLQGPIWAKIPHTDGNFHPSPLMGGFGMKHPPPQILIKNTPVPADPPTAFNKDKLNSFITQYSTGQVSVEIEWELQKENSKRWNPEIQYTSNYYKSNNVEFAVNTEGVYSEPRPIGTRYLTRNL

SEQ ID NO: 56 - protein, 742 aa, synthetic construct
MAADGYLPDWLEDNLSEGIREWWALKPGAPQPKANQQHQDNARGLVLPGYKYLGPGNGLDKGEPVNAADAAALEHDKAYDQQLKAGDNPYLKYNHADAEFQERLKEDTSFGGNLGRAVFQAKKRLLEPLGLVEEAAKTAPGKKRPVEQSPQEPDSSAGIGKSGAQPAKKRLNFGQTGDTESVPDPQPIGEPPAAPSGVGSLTMASGGGAPVADNNEGADGVGSSSGNWHCDSQWLGDRVITTSTRTWALPTYNNHLYKQISNSTSGGSSNDNAYFGYSTPWGYFDFNRFHCHFSPRDWQRLINNNWGFRPKRLNFKLFNIQVKEVTDNNGVKTIANNLTSTVQVFTDSDYQLPYVLGSAHEGCLPPFPADVFMIPQYGYLTLNDGSQAVGRSSFYCLEYFPSQMLRTGNNFQFSYEFENVPFHSSYAHSQSLDRLMNPLIDQYLYYLSKTINGSGSPHFTRQNQQTLKFSVAGPSNMAVQGRNYIPGPSYRQQRVSTTVTQNNNSEFAWPGASSWALNGRNSLMNPGPAMASHKEGEDRFFPLSGSLIFGKQGTGRDNVDADKVMITNEEEIKTTNPVATESYGQVATNHQSAQAQAQTGWVQNQGILPGMVWQDRDVYLQGPIWAKIPHTDGNFHPSPLMGGFGMKHPPPQILIKNTPVPADPPTAFNKDKLNSFITQYSTGQVSVEIEWELQKENSKRWNPEIQYTSNYYKSNNVEFAVNTEGVYSEPRPIGTRYLTRNL

SEQ ID NO: 57 - protein, 742 aa, synthetic construct
MAADGYLPDWLEDNLSEGIREWWALKPGAPQPKANQQHQDNARGLVLPGYKYLGPGNGLDKGEPVNAADAAALEHDKAYDQQLKAGDNPYLKYNHADAEFQERLKEDTSFGGNLGRAVFQAKKRLLEPLGLVEEAAKTAPGKKRPVEQSPQEPDSSAGIGKSGAQPAKKRLNFGQTGDTESVPDPQPIGEPPAAPSGVGSLTMASGGGAPVADNNEGADGVGSSSGNWHCDSQWLGDRVITTSTRTWALPTYNNHLYKQISNSTSGGSSNDNAYFGYSTPWGYFDFNRFHCHFSPRDWQRLINNNWGFRPKRLNFKLFNIQVKEVTDNNGVKTIANNLTSTVQVFTDSDYQLPYVLGSAHEGCLPPFPADVFMIPQYGYLTLNDGSQAVGRSSFYCLEYFPSQMLRTGNNFQFSYEFENVPFHSSYAHSQSLDRLMNPLIDQYLYYLSKTSNGHDSPHSKAQNQQTLKFSVAGPSNMAVQGRNYIPGPSYRQQRVSTTVTQNNNSEFAWPGASSWALNGRNSLMNPGPAMASHKEGEDRFFPLSGSLIFGKQGTGRDNVDADKVMITNEEEIKTTNPVATESYGQVATNHQSAQAQAQTGWVQNQGILPGMVWQDRDVYLQGPIWAKIPHTDGNFHPSPLMGGFGMKHPPPQILIKNTPVPADPPTAFNKDKLNSFITQYSTGQVSVEIEWELQKENSKRWNPEIQYTSNYYKSNNVEFAVNTEGVYSEPRPIGTRYLTRNL

SEQ ID NO: 58 - protein, 742 aa, synthetic construct
MAADGYLPDWLEDNLSEGIREWWALKPGAPQPKANQQHQDNARGLVLPGYKYLGPGNGLDKGEPVNAADAAALEHDKAYDQQLKAGDNPYLKYNHADAEFQERLKEDTSFGGNLGRAVFQAKKRLLEPLGLVEEAAKTAPGKKRPVEQSPQEPDSSAGIGKSGAQPAKKRLNFGQTGDTESVPDPQPIGEPPAAPSGVGSLTMASGGGAPVADNNEGADGVGSSSGNWHCDSQWLGDRVITTSTRTWALPTYNNHLYKQISNSTSGGSSNDNAYFGYSTPWGYFDFNRFHCHFSPRDWQRLINNNWGFRPKRLNFKLFNIQVKEVTDNNGVKTIANNLTSTVQVFTDSDYQLPYVLGSAHEGCLPPFPADVFMIPQYGYLTLNDGSQAVGRSSFYCLEYFPSQMLRTGNNFQFSYEFENVPFHSSYAHSQSLDRLMNPLIDQYLYYLSKTINGSGSPHSLPWNQQTLKFSVAGPSNMAVQGRNYIPGPSYRQQRVSTTVTQNNNSEFAWPGASSWALNGRNSLMNPGPAMASHKEGEDRFFPLSGSLIFGKQGTGRDNVDADKVMITNEEEIKTTNPVATESYGQVATNHQSAQAQAQTGWVQNQGILPGMVWQDRDVYLQGPIWAKIPHTDGNFHPSPLMGGFGMKHPPPQILIKNTPVPADPPTAFNKDKLNSFITQYSTGQVSVEIEWELQKENSKRWNPEIQYTSNYYKSNNVEFAVNTEGVYSEPRPIGTRYLTRNL

SEQ ID NO: 59 - protein, 742 aa, synthetic construct
MAADGYLPDWLEDNLSEGIREWWALKPGAPQPKANQQHQDNARGLVLPGYKYLGPGNGLDKGEPVNAADAAALEHDKAYDQQLKAGDNPYLKYNHADAEFQERLKEDTSFGGNLGRAVFQAKKRLLEPLGLVEEAAKTAPGKKRPVEQSPQEPDSSAGIGKSGAQPAKKRLNFGQTGDTESVPDPQPIGEPPAAPSGVGSLTMASGGGAPVADNNEGADGVGSSSGNWHCDSQWLGDRVITTSTRTWALPTYNNHLYKQISNSTSGGSSNDNAYFGYSTPWGYFDFNRFHCHFSPRDWQRLINNNWGFRPKRLNFKLFNIQVKEVTDNNGVKTIANNLTSTVQVFTDSDYQLPYVLGSAHEGCLPPFPADVFMIPQYGYLTLNDGSQAVGRSSFYCLEYFPSQMLRTGNNFQFSYEFENVPFHSSYAHSQSLDRLMNPLIDQYLYYLSKTINGHDSPHSKAQNHQTLKFSVAGPSNMAVQGRNYIPGPSYRQQRVSTTVTQNNNSEFAWPGASSWALNGRNSLMNPGPAMASHKEGEDRFFPLSGSLIFGKQGTGRDNVDADKVMITNEEEIKTTNPVATESYGQVATNHQSAQAQAQTGWVQNQGILPGMVWQDRDVYLQGPIWAKIPHTDGNFHPSPLMGGFGMKHPPPQILIKNTPVPADPPTAFNKDKLNSFITQYSTGQVSVEIEWELQKENSKRWNPEIQYTSNYYKSNNVEFAVNTEGVYSEPRPIGTRYLTRNL

SEQ ID NO: 60 - protein, 19 aa, synthetic construct
MNFGLSLIFLVLVLKGVQC

SEQ ID NO: 61 - protein, 19 aa, synthetic construct
MKLPVRLLVLMFWIPASSS

SEQ ID NO: 62 - protein, 743 aa, synthetic construct; identical to SEQ ID NO: 13

SEQ ID NO: 63 - DNA, 336 bp, synthetic construct
  source 1..336: mol_type = other DNA
gatgtggtgatgacacagacccctctgagcctgcctgtgtccctcggcgaccaggccagcatcagctgtagaagcagccaatctctggtgcacaacaatggcatcacctacctgtactggtatctgcagaaacctggccagagccccaagctgctgatctaccgggtgtccaatcggttcagcggagtgccagatagatttggcggatctggcagcggcaccgacttcaccctgaagatctctagagtcgaggccgaggacctgggcgtgtacttctgcttccagggcacacacgtgcccagaaccttcggcggcggaacaaagctggaaatcaag

SEQ ID NO: 64 - protein, 10 aa, synthetic construct
GFTFTRYWMH

SEQ ID NO: 65 - protein, 445 aa, synthetic construct
QVQLQQPGTELVKPGSSVNLSCKASGFTFTRYWMHWVKERPGHGLEWIGNINPNNGGTDFNEKFKNKATLTVHKSSTTVFIQLSSLTSEDSAVYYCARGTGTGAMDYWGQGTSVTVSSASTKGPSVFPLAPCSRSTSESTAALGCLVKDYFPEPVTVSWNSGALTSGVHTFPAVLQSSGLYSLSSVVTVPSSSLGTKTYTCNVDHKPSNTKVDKRVESKYGPPCPPCPAPEFLGGPSVFLFPPKPKDTLMISRTPEVTCVVVDVSQEDPEVQFNWYVDGVEVHNAKTKPREEQFNSTYRVVSVLTVLHQDWLNGKEYKCKVSNKGLPSSIEKTISKAKGQPREPQVYTLPPSQEEMTKNQVSLTCLVKGFYPSDIAVEWESNGQPENNYKTTPPVLDSDGSFFLYSRLTVDKSRWQEGNVFSCSVMHEALHNHYTQKSLSLSLGK

SEQ ID NO: 66 - protein, 219 aa, synthetic construct
DVVMTQTPLSLPVSLGDQASISCRSSQSLVHNNGITYLYWYLQKPGQSPKLLIYRVSNRFSGVPDRFGGSGSGTDFTLKISRVEAEDLGVYFCFQGTHVPRTFGGGTKLEIKRTVAAPSVFIFPPSDEQLKSGTASVVCLLNNFYPREAKVQWKVDNALQSGNSQESVTEQDSKDSTYSLSSTLTLSKADYEKHKVYACEVTHQGLSSPVTKSFNRGEC

SEQ ID NO: 67 - protein, 118 aa, synthetic construct
QVQLVESGAEVKKPGASVKVSCKASGFTFTRYWMHWVKERPGHGLEWMGNINPNNGGTDFNEKFKNRVTITVHKSASTAYMELSSLRSEDTAVYYCARGTGTGAMDYWGQGTTVTVSS

SEQ ID NO: 68 - protein, 118 aa, synthetic construct
QVQLVQSGAEVKKPGASVKVSCKASGFTFTRYWMHWVRERPGHGLEWIGNINPNNGGTDFNEKFKNRVTMTVHKSISTAYMELSSLRSDDSAVYYCARGTGTGAMDYWGQGTLVTVSS

SEQ ID NO: 69 - protein, 118 aa, synthetic construct
QVQLVQSGAEVKKSGASVKVSCKASGFTFTRYWMHWVRQAPGQGLEWIGNINPNNGGTDFNEKFKNRVTLIRDTSTTTVFIQLTSLTSEDSAVYYCARGTGTGAMDYWGQGTLVTVSS

SEQ ID NO: 70 - protein, 118 aa, synthetic construct
EVQLVQSGAEVKKPGSSVKVSCKASGFTFTRYWMHWVKERPGHGLEWIGNINPNNGGTDFNEKFKNRVTMTVHKSITTAYMELSRLTSDDSAVYYCARGTGTGAMDYWGQGTLVSVSS

SEQ ID NO: 71 - protein, 118 aa, synthetic construct
QVQLVQSGAEVKKPGASVKVSCKASGFTFTRYWMHWVKERPGQGLEWMGNINPNNGGTDFNEKFKNRVTMTVHKSTSTVFIQLSSLRSEDTAVYYCARGTGTGAMDYWGQGTSVTVSS

SEQ ID NO: 72 - protein, 112 aa, synthetic construct
DVVMTQSPLSLPVTLGQPASISCRSSQSLVHNNGITYLYWYQQRPGQSPRLLIYRVSNRFSGVPDRFSGSGSGTDFTLKISRVEAEDVGVYYCFQGTHVPRTFGQGTKLEIK

SEQ ID NO: 73 - protein, 112 aa, synthetic construct
DIVMTQSPLSLSVTPGQPASISCRSSQSLVHNNGITYLYWYLQKPGQSPQLLIYRVSNRFSGVPDRFSGSGSGTDFTLKISRVEAEDVGVYYCFQGTHVPRTFGQGTKVEIK

SEQ ID NO: 74 - protein, 112 aa, synthetic construct
DIVMTQTPLSSPVTLGQPASISCRSSQSLVHNNGITYLYWYQQRPGQPPRLLIYRVSNRFSGVPDRFSGSGAGTDFTLKINRVEAEDVGVYFCFQGTHVPRTFGQGTKLEIK

SEQ ID NO: 75 - protein, 112 aa, synthetic construct
DIEMTQSPLSLPVTLGQPASISCRSSQSLVHNNGITYLYWYQQRPGQSPRRLIYRVSNRFSGVPDRFSGSGSGTDFTLKISRVEAEDVGVYFCFQGTHVPRTFGGGTKLEIK

SEQ ID NO: 76 - protein, 112 aa, synthetic construct
EIVLTQSPATLSLSPGERATLSCRSSQSLVHNNGITYLYWYLQKPGQAPKLLIYRVSNRFSGIPDRFSGSGPGTDFTLTISSLEPEDLAVYFCFQGTHVPRTFGGGTKLEIK

SEQ ID NO: 77 - DNA, 2226 bp, synthetic construct
  source 1..2226: mol_type = other DNA
atggctgccgatggttatcttccagattggctcgaggacaaccttagtgaaggaattcgcgagtggtgggctttgaaacctggagcccctcaacccaaggcaaatcaacaacatcaagacaacgctcgaggtcttgtgcttccgggttacaaataccttggacccggcaacggactcgacaagggggagccggtcaacgcagcagacgcggcggccctcgagcacgacaaggcctacgaccagcagctcaaggccggagacaacccgtacctcaagtacaaccacgccgacgccgagttccaggagcggctcaaagaagatacgtcttttgggggcaacctcgggcgagcagtcttccaggccaaaaagaggcttcttgaacctcttggtctggttgaggaagcggctaagacggctcctggaaagaagaggcctgtagagcagtctcctcaggaaccggactcctccgcgggtattggcaaatcgggtgcacagcccgctaaaaagagactcaatttcggtcagactggcgacacagagtcagtcccagaccctcaaccaatcggagaacctcccgcagccccctcaggtgtgggatctcttacaatggcttcaggtggtggcgcaccagtggcagacaataacgaaggtgccgatggagtgggtagttcctcgggaaattggcattgcgattcccaatggctgggggacagagtcatcaccaccagcacccgaacctgggccctgcccacctacaacaatcacctctacaagcaaatctccaacagcacatctggaggatcttcaaatgacaacgcctacttcggctacagcaccccctgggggtattttgacttcaacagattccactgccacttctcaccacgtgactggcagcgactcatcaacaacaactggggattccggcctaagcgactcaacttcaagctcttcaacattcaggtcaaagaggttacggacaacaatggagtcaagaccatcgccaataaccttaccagcacggtccaggtcttcacggactcagactatcagctcccgtacgtgctcgggtcggctcacgagggctgcctcccgccgttcccagcggacgttttcatgattcctcagtacgggtatctgacgcttaatgatggaagccaggccgtgggtcgttcgtccttttactgcctggaatatttcccgtcgcaaatgctaagaacgggtaacaacttccagttcagctacgagtttgagaacgtacctttccatagcagctacgctcacagccaaagcctggaccgactaatgaatccactcatcgatcagtatctgtattacttgagtaagacggagcgtgtgtctggttctccgcattctaaggcgcagaatcagcagacgttgaagttttcggtagctggtcctagcaacatggctgtccagggaagaaactacatacctggacccagctaccgacaacaacgtgtctcaaccactgtgactcaaaacaacaacagcgaatttgcttggcctggagcttcttcttgggctctcaatggacgtaatagcttgatgaatcctggacctgctatggccagccacaaagaaggagaggaccgtttctttcctttgtctggatctttaatttttggcaaacaaggaactggaagagacaacgtggatgcggacaaagtcatgataaccaacgaagaagaaattaaaactactaacccggtagcaacggagtcctatggacaagtggccacaaaccaccagagtgcccaagcacaggcgcagaccggctgggttcaaaaccaaggaatacttccgggtatggtttggcaggacagagatgtgtacctgcaaggacccatttgggccaaaattcctcacacggacggcaactttcacccttctccgctgatgggagggtttggaatgaagcacccgcctcctcagatcctcatcaaaaacacacctgtacctgcggatcctccaacggccttcaacaaggacaagctgaactctttcatcacccagtattctactggccaagtcagcgtggagatcgagtgggagctgcagaaggaaaacagcaagcgctggaacccggagatccagtacacttccaactattacaagtctaataatgttgaatttgctgttaatactgaaggtgtatatagtgaaccccgccccattggcacgcggtatttaacgaggaactta

SEQ ID NO: 78 - protein, 219 aa, synthetic construct
DVVMTQTPLSLPVSLGDQASISCRSSQSLVHNNGITYLYWYLQKPGQSPKLLIYRVSNRFSGVPDRFGGSGSGTDFTLKISRVEAEDLGVYFCFQGTHVPRTFGGGTKLEIKRADAAPTVSIFPPSSEQLTSGGASVVCFLNNFYPKDINVKWKIDGSERQNGVLNSWTDQDSKDSTYSMSSTLTLTKDEYERHNSYTCEATHKTSTSPIVKSFNRNEC

SEQ ID NO: 79 - DNA, 2226 bp, synthetic construct
  source 1..2226: mol_type = other DNA
atggctgccgatggttatcttccagattggctcgaggacaaccttagtgaaggaattcgcgagtggtgggctttgaaacctggagcccctcaacccaaggcaaatcaacaacatcaagacaacgctcgaggtcttgtgcttccgggttacaaataccttggacccggcaacggactcgacaagggggagccggtcaacgcagcagacgcggcggccctcgagcacgacaaggcctacgaccagcagctcaaggccggagacaacccgtacctcaagtacaaccacgccgacgccgagttccaggagcggctcaaagaagatacgtcttttgggggcaacctcgggcgagcagtcttccaggccaaaaagaggcttcttgaacctcttggtctggttgaggaagcggctaagacggctcctggaaagaagaggcctgtagagcagtctcctcaggaaccggactcctccgcgggtattggcaaatcgggtgcacagcccgctaaaaagagactcaatttcggtcagactggcgacacagagtcagtcccagaccctcaaccaatcggagaacctcccgcagccccctcaggtgtgggatctcttacaatggcttcaggtggtggcgcaccagtggcagacaataacgaaggtgccgatggagtgggtagttcctcgggaaattggcattgcgattcccaatggctgggggacagagtcatcaccaccagcacccgaacctgggccctgcccacctacaacaatcacctctacaagcaaatctccaacagcacatctggaggatcttcaaatgacaacgcctacttcggctacagcaccccctgggggtattttgacttcaacagattccactgccacttctcaccacgtgactggcagcgactcatcaacaacaactggggattccggcctaagcgactcaacttcaagctcttcaacattcaggtcaaagaggttacggacaacaatggagtcaagaccatcgccaataaccttaccagcacggtccaggtcttcacggactcagactatcagctcccgtacgtgctcgggtcggctcacgagggctgcctcccgccgttcccagcggacgttttcatgattcctcagtacgggtatctgacgcttaatgatggaagccaggccgtgggtcgttcgtccttttactgcctggaatatttcccgtcgcaaatgctaagaacgggtaacaacttccagttcagctacgagtttgagaacgtacctttccatagcagctacgctcacagccaaagcctggaccgactaatgaatccactcatcgatcagtatctgtattacttgagtaaggcggagattggtcatgattctccgcataagtctggtcagaatcagcagacgttgaagttttcggtagctggtcctagcaacatggctgtccagggaagaaactacatacctggacccagctaccgacaacaacgtgtctcaaccactgtgactcaaaacaacaacagcgaatttgcttggcctggagcttcttcttgggctctcaatggacgtaatagcttgatgaatcctggacctgctatggccagccacaaagaaggagaggaccgtttctttcctttgtctggatctttaatttttggcaaacaaggaactggaagagacaacgtggatgcggacaaagtcatgataaccaacgaagaagaaattaaaactactaacccggtagcaacggagtcctatggacaagtggccacaaaccaccagagtgcccaagcacaggcgcagaccggctgggttcaaaaccaaggaatacttccgggtatggtttggcaggacagagatgtgtacctgcaaggacccatttgggccaaaattcctcacacggacggcaactttcacccttctccgctgatgggagggtttggaatgaagcacccgcctcctcagatcctcatcaaaaacacacctgtacctgcggatcctccaacggccttcaacaaggacaagctgaactctttaatcacccagtattctactggccaagtcagcgtggagatcgagtgggagctgcagaaggaaaacagcaagcgctggaacccggagatccagtacacttccaactattacaagtctaataatgttgaatttgctgttaatactgaaggtgtatatagtgaaccccgccccattggcacgcggtatttaacgaggaactta

SEQ ID NO: 80 - DNA, 657 bp, synthetic construct
  source 1..657: mol_type = other DNA
gatgtggtgatgacacagacccctctgagcctgcctgtgtccctcggcgaccaggccagcatcagctgtagaagcagccaatctctggtgcacaacaatggcatcacctacctgtactggtatctgcagaaacctggccagagccccaagctgctgatctaccgggtgtccaatcggttcagcggagtgccagatagatttggcggatctggcagcggcaccgacttcaccctgaagatctctagagtcgaggccgaggacctgggcgtgtacttctgcttccagggcacacacgtgcccagaaccttcggcggcggaacaaagctggaaatcaagcgggctgatgctgcaccaactgtatccatcttcccaccatccagtgagcagttaacatctggaggtgcctcagtcgtgtgcttcttgaacaacttctaccccaaagacatcaatgtcaagtggaagattgatggcagtgaacgacaaaatggcgtcctgaacagttggactgatcaggacagcaaagacagcacctacagcatgagcagcaccctcacgttgaccaaggacgagtatgaacgacataacagctatacctgtgaggccactcacaagacatcaacttcacccattgtcaagagcttcaacaggaatgagtgt

SEQ ID NO: 81 - DNA, 2226 bp, synthetic construct
  source 1..2226: mol_type = other DNA
atggctgccgatggttatcttccagattggctcgaggacaaccttagtgaaggaattcgcgagtggtgggctttgaaacctggagcccctcaacccaaggcaaatcaacaacatcaagacaacgctcgaggtcttgtgcttccgggttacaaataccttggacccggcaacggactcgacaagggggagccggtcaacgcagcagacgcggcggccctcgagcacgacaaggcctacgaccagcagctcaaggccggagacaacccgtacctcaagtacaaccacgccgacgccgagttccaggagcggctcaaagaagatacgtcttttgggggcaacctcgggcgagcagtcttccaggccaaaaagaggcttcttgaacctcttggtctggttgaggaagcggctaagacggctcctggaaagaagaggcctgtagagcagtctcctcaggaaccggactcctccgcgggtattggcaaatcgggtgcacagcccgctaaaaagagactcaatttcggtcagactggcgacacagagtcagtcccagaccctcaaccaatcggagaacctcccgcagccccctcaggtgtgggatctcttacaatggcttcaggtggtggcgcaccagtggcagacaataacgaaggtgccgatggagtgggtagttcctcgggaaattggcattgcgattcccaatggctgggggacagagtcatcaccaccagcacccgaacctgggccctgcccacctacaacaatcacctctacaagcaaatctccaacagcacatctggaggatcttcaaatgacaacgcctacttcggctacagcaccccctgggggtattttgacttcaacagattccactgccacttctcaccacgtgactggcagcgactcatcaacaacaactggggattccggcctaagcgactcaacttcaagctcttcaacattcaggtcaaagaggttacggacaacaatggagtcaagaccatcgccaataaccttaccagcacggtccaggtcttcacggactcagactatcagctcccgtacgtgctcgggtcggctcacgagggctgcctcccgccgttcccagcggacgttttcatgattcctcagtacgggtatctgacgcttaatgatggaagccaggccgtgggtcgttcgtccttttactgcctggaatatttcccgtcgcaaatgctaagaacgggtaacaacttccagttcagctacgagtttgagaacgtacctttccatagcagctacgctcacagccaaagcctggaccgactaatgaatccactcatcgatcagtatctgtattacttgagtaagacgattattggttctggttctccgcattctaaggcgcagaatcgtcatacgttgaagttttcggtagctggtcctagcaacatggctgtccagggaagaaactacatacctggacccagctaccgacaacaacgtgtctcaaccactgtgactcaaaacaacaacagcgaatttgcttggcctggagcttcttcttgggctctcaatggacgtaatagcttgatgaatcctggacctgctatggccagccacaaagaaggagaggaccgtttctttcctttgtctggatctttaatttttggcaaacaaggaactggaagagacaacgtggatgcggacaaagtcatgataaccaacgaagaagaaattaaaactactaacccggtagcaacggagtcctatggacaagtggccacaaaccaccagagtgcccaagcacaggcgcagaccggctgggttcaaaaccaaggaatacttccgggtatggtttggcaggacagagatgtgtacctgcaaggacccatttgggccaaaattcctcacacggacggcaactttcacccttctccgctgatgggagggtttggaatgaagcacccgcctcctcagatcctcatcaaaaacacacctgtacctgcggatcctccaacggccttcaacaaggacaagctgaactctttcatcacccagtattctactggccaagtcagcgtggagatcgagtgggagctgcagaaggaaaacagcaagcgctggaacccggagatccagtacacttccaactattacaagtctaataatgttgaatttgctgttaatactgaaggtgtatatagtgaaccccgccccattggcacgcggtatttaacgaggaactta

SEQ ID NO: 82 - DNA, 2226 bp, synthetic construct
  source 1..2226: mol_type = other DNA
atggctgccgatggttatcttccagattggctcgaggacaaccttagtgaaggaattcgcgagtggtgggctttgaaacctggagcccctcaacccaaggcaaatcaacaacatcaagacaacgctcgaggtcttgtgcttccgggttacaaataccttggacccggcaacggactcgacaagggggagccggtcaacgcagcagacgcggcggccctcgagcacgacaaggcctacgaccagcagctcaaggccggagacaacccgtacctcaagtacaaccacgccgacgccgagttccaggagcggctcaaagaagatacgtcttttgggggcaacctcgggcgagcagtcttccaggccaaaaagaggcttcttgaacctcttggtctggttgaggaagcggctaagacggctcctggaaagaagaggcctgtagagcagtctcctcaggaaccggactcctccgcgggtattggcaaatcgggtgcacagcccgctaaaaagagactcaatttcggtcagactggcgacacagagtcagtcccagaccctcaaccaatcggagaacctcccgcagccccctcaggtgtgggatctcttacaatggcttcaggtggtggcgcaccagtggcagacaataacgaaggtgccgatggagtgggtagttcctcgggaaattggcattgcgattcccaatggctgggggacagagtcatcaccaccagcacccgaacctgggccctgcccacctacaacaatcacctctacaagcaaatctccaacagcacatctggaggatcttcaaatgacaacgcctacttcggctacagcaccccctgggggtattttgacttcaacagattccactgccacttctcaccacgtgactggcagcgactcatcaacaacaactggggattccggcctaagcgactcaacttcaagctcttcaacattcaggtcaaagaggttacggacaacaatggagtcaagaccatcgccaataaccttaccagcacggtccaggtcttcacggactcagactatcagctcccgtacgtgctcgggtcggctcacgagggctgcctcccgccgttcccagcggacgttttcatgattcctcagtacgggtatctgacgcttaatgatggaagccaggccgtgggtcgttcgtccttttactgcctggaatatttcccgtcgcaaatgctaagaacgggtaacaacttccagttcagctacgagtttgagaacgtacctttccatagcagctacgctcacagccaaagcctggaccgactaatgaatccactcatcgatcagtatctgtattacttgagtaagacggagaagatgtctggttctccgcattctaaggcgcagaatcagcagacgttgaagttttcggtagctggtcctagcaacatggctgtccagggaagaaactacatacctggacccagctaccgacaacaacgtgtctcaaccactgtgactcaaaacaacaacagcgaatttgcttggcctggagcttcttcttgggctctcaatggacgtaatagcttgatgaatcctggacctgctatggccagccacaaagaaggagaggaccgtttctttcctttgtctggatctttaatttttggcaaacaaggaactggaagagacaacgtggatgcggacaaagtcatgataaccaacgaagaagaaattaaaactactaacccggtagcaacggagtcctatggacaagtggccacaaaccaccagagtgcccaagcacaggcgcagaccggctgggttcaaaaccaaggaatacttccgggtatggtttggcaggacagagatgtgtacctgcaaggacccatttgggccaaaattcctcacacggacggcaactttcacccttctccgctgatgggagggtttggaatgaagcacccgcctcctcagatcctcatcaaaaacacacctgtacctgcggatcctccaacggccttcaacaaggacaagctgaactctttcatcacccagtattctactggccaagtcagcgtggagatcgagtgggagctgcagaaggaaaacagcaagcgctggaacccggagatccagtacacttccaactattacaagtctaataatgttgaatttgctgttaatactgaaggtgtatatagtgaaccccgccccattggcacgcggtatttaacgaggaactta

SEQ ID NO: 83 - DNA, 2226 bp, synthetic construct
  source 1..2226: mol_type = other DNA
atggctgccgatggttatcttccagattggctcgaggacaaccttagtgaaggaattcgcgagtggtgggctttgaaacctggagcccctcaacccaaggcaaatcaacaacatcaagacaacgctcgaggtcttgtgcttccgggttacaaataccttggacccggcaacggactcgacaagggggagccggtcaacgcagcagacgcggcggccctcgagcacgacaaggcctacgaccagcagctcaaggccggagacaacccgtacctcaagtacaaccacgccgacgccgagttccaggagcggctcaaagaagatacgtcttttgggggcaacctcgggcgagcagtcttccaggccaaaaagaggcttcttgaacctcttggtctggttgaggaagcggctaagacggctcctggaaagaagaggcctgtagagcagtctcctcaggaaccggactcctccgcgggtattggcaaatcgggtgcacagcccgctaaaaagagactcaatttcggtcagactggcgacacagagtcagtcccagaccctcaaccaatcggagaacctcccgcagccccctcaggtgtgggatctcttacaatggcttcaggtggtggcgcaccagtggcagacaataacgaaggtgccgatggagtgggtagttcctcgggaaattggcattgcgattcccaatggctgggggacagagtcatcaccaccagcacccgaacctgggccctgcccacctacaacaatcacctctacaagcaaatctccaacagcacatctggaggatcttcaaatgacaacgcctacttcggctacagcaccccctgggggtattttgacttcaacagattccactgccacttctcaccacgtgactggcagcgactcatcaacaacaactggggattccggcctaagcgactcaacttcaagctcttcaacattcaggtcaaagaggttacggacaacaatggagtcaagaccatcgccaataaccttaccagcacggtccaggtcttcacggactcagactatcagctcccgtacgtgctcgggtcggctcacgagggctgcctcccgccgttcccagcggacgttttcatgattcctcagtacgggtatctgacgcttaatgatggaagccaggccgtgggtcgttcgtccttttactgcctggaatatttcccgtcgcaaatgctaagaacgggtaacaacttccagttcagctacgagtttgagaacgtacctttccatagcagctacgctcacagccaaagcctggaccgactaatgaatccactcatcgatcagtatctgtattacttgagtaaggagattaatggtcgtggttctccgcattctaaggcgcagaatcagcagacgttgaagttttcggtagctggtcctagcaacatggctgtccagggaagaaactacatacctggacccagctaccgacaacaacgtgtctcaaccactgtgactcaaaacaacaacagcgaatttgcttggcctggagcttcttcttgggctctcaatggacgtaatagcttgatgaatcctggacctgctatggccagccacaaagaaggagaggaccgtttctttcctttgtctggatctttaatttttggcaaacaaggaactggaagagacaacgtggatgcggacaaagtcatgataaccaacgaagaagaaattaaaactactaacccggtagcaacggagtcctatggacaagtggccacaaaccaccagagtgcccaagcacaggcgcagaccggctgggttcaaaaccaaggaatacttccgggtatggtttggcaggacagagatgtgtacctgcaaggacccatttgggccaaaattcctcacacggacggcaactttcacccttctccgctgatgggagggtttggaatgaagcacccgcctcctcagatcctcatcaaaaacacacctgtacctgcggatcctccaacggccttcaacaaggacaagctgaactctttcatcacccagtattctactggccaagtcagcgtggagatcgagtgggagctgcagaaggaaaacagcaagcgctggaacccggagatccagtacacttccaactattacaagtctaataatgttgaatttgctgttaatactgaaggtgtatatagtgaaccccgccccattggcacgcggtatttaacgaggaactta

SEQ ID NO: 84 - DNA, 2226 bp, synthetic construct
  source 1..2226: mol_type = other DNA
atggctgccgatggttatcttccagattggctcgaggacaaccttagtgaaggaattcgcgagtggtgggctttgaaacctggagcccctcaacccaaggcaaatcaacaacatcaagacaacgctcgaggtcttgtgcttccgggttacaaataccttggacccggcaacggactcgacaagggggagccggtcaacgcagcagacgcggcggccctcgagcacgacaaggcctacgaccagcagctcaaggccggagacaacccgtacctcaagtacaaccacgccgacgccgagttccaggagcggctcaaagaagatacgtcttttgggggcaacctcgggcgagcagtcttccaggccaaaaagaggcttcttgaacctcttggtctggttgaggaagcggctaagacggctcctggaaagaagaggcctgtagagcagtctcctcaggaaccggactcctccgcgggtattggcaaatcgggtgcacagcccgctaaaaagagactcaatttcggtcagactggcgacacagagtcagtcccagaccctcaaccaatcggagaacctcccgcagccccctcaggtgtgggatctcttacaatggcttcaggtggtggcgcaccagtggcagacaataacgaaggtgccgatggagtgggtagttcctcgggaaattggcattgcgattcccaatggctgggggacagagtcatcaccaccagcacccgaacctgggccctgcccacctacaacaatcacctctacaagcaaatctccaacagcacatctggaggatcttcaaatgacaacgcctacttcggctacagcaccccctgggggtattttgacttcaacagattccactgccacttctcaccacgtgactggcagcgactcatcaacaacaactggggattccggcctaagcgactcaacttcaagctcttcaacattcaggtcaaagaggttacggacaacaatggagtcaagaccatcgccaataaccttaccagcacggtccaggtcttcacggactcagactatcagctcccgtacgtgctcgggtcggctcacgagggctgcctcccgccgttcccagcggacgttttcatgattcctcagtacgggtatctgacgcttaatgatggaagccaggccgtgggtcgttcgtccttttactgcctggaatatttcccgtcgcaaatgctaagaacgggtaacaacttccagttcagctacgagtttgagaacgtacctttccatagcagctacgctcacagccaaagcctggaccgactaatgaatccactcatcgatcagtatctgtattacttgagtaagacgtttaatggttctggttctccgcattctaaggcgccgaatctgcagacgttgaagttttcggtagctggtcctagcaacatggctgtccagggaagaaactacatacctggacccagctaccgacaacaacgtgtctcaaccactgtgactcaaaacaacaacagcgaatttgcttggcctggagcttcttcttgggctctcaatggacgtaatagcttgatgaatcctggacctgctatggccagccacaaagaaggagaggaccgtttctttcctttgtctggatctttaatttttggcaaacaaggaactggaagagacaacgtggatgcggacaaagtcatgataaccaacgaagaagaaattaaaactactaacccggtagcaacggagtcctatggacaagtggccacaaaccaccagagtgcccaagcacaggcgcagaccggctgggttcaaaaccaaggaatacttccgggtatggtttggcaggacagagatgtgtacctgcaaggacccatttgggccaaaattcctcacacggacggcaactttcacccttctccgctgatgggagggtttggaatgaagcacccgcctcctcagatcctcatcaaaaacacacctgtacctgcggatcctccaacggccttcaacaaggacaagctgaactctttcatcacccagtattctactggccaagtcagcgtggagatcgagtgggagctgcagaaggaaaacagcaagcgctggaacccggagatccagtacacttccaactattacaagtctaataatgttgaatttgctgttaatactgaaggtgtatatagtgaaccccgccccattggcacgcggtatttaacgaggaactta

SEQ ID NO: 85 - DNA, 2226 bp, synthetic construct
  source 1..2226: mol_type = other DNA
atggctgccgatggttatcttccagattggctcgaggacaaccttagtgaaggaattcgcgagtggtgggctttgaaacctggagcccctcaacccaaggcaaatcaacaacatcaagacaacgctcgaggtcttgtgcttccgggttacaaataccttggacccggcaacggactcgacaagggggagccggtcaacgcagcagacgcggcggccctcgagcacgacaaggcctacgaccagcagctcaaggccggagacaacccgtacctcaagtacaaccacgccgacgccgagttccaggagcggctcaaagaagatacgtcttttgggggcaacctcgggcgagcagtcttccaggccaaaaagaggcttcttgaacctcttggtctggttgaggaagcggctaagacggctcctggaaagaagaggcctgtagagcagtctcctcaggaaccggactcctccgcgggtattggcaaatcgggtgcacagcccgctaaaaagagactcaatttcggtcagactggcgacacagagtcagtcccagaccctcaaccaatcggagaacctcccgcagccccctcaggtgtgggatctcttacaatggcttcaggtggtggcgcaccagtggcagacaataacgaaggtgccgatggagtgggtagttcctcgggaaattggcattgcgattcccaatggctgggggacagagtcatcaccaccagcacccgaacctgggccctgcccacctacaacaatcacctctacaagcaaatctccaacagcacatctggaggatcttcaaatgacaacgcctacttcggctacagcaccccctgggggtattttgacttcaacagattccactgccacttctcaccacgtgactggcagcgactcatcaacaacaactggggattccggcctaagcgactcaacttcaagctcttcaacattcaggtcaaagaggttacggacaacaatggagtcaagaccatcgccaataaccttaccagcacggtccaggtcttcacggactcagactatcagctcccgtacgtgctcgggtcggctcacgagggctgcctcccgccgttcccagcggacgttttcatgattcctcagtacgggtatctgacgcttaatgatggaagccaggccgtgggtcgttcgtccttttactgcctggaatatttcccgtcgcaaatgctaagaacgggtaacaacttccagttcagctacgagtttgagaacgtacctttccatagcagctacgctcacagccaaagcctggaccgactaatgaatccactcatcgatcagtatctgtattacttgagtaagacggagaagacgtctggttctccgcattctaaggcgcagaatcagcagacgttgaagttttcggtagctggtcctagcaacatggctgtccagggaagaaactacatacctggacccagctaccgacaacaacgtgtctcaaccactgtgactcaaaacaacaacagcgaatttgcttggcctggagcttcttcttgggctctcaatggacgtaatagcttgatgaatcctggacctgctatggccagccacaaagaaggagaggaccgtttctttcctttgtctggatctttaatttttggcaaacaaggaactggaagagacaacgtggatgcggacaaagtcatgataaccaacgaagaagaaattaaaactactaacccggtagcaacggagtcctatggacaagtggccacaaaccaccagagtgcccaagcacaggcgcagaccggctgggttcaaaaccaaggaatacttccgggtatggtttggcaggacagagatgtgtacctgcaaggacccatttgggccaaaattcctcacacggacggcaactttcacccttctccgctgatgggagggtttggaatgaagcacccgcctcctcagatcctcatcaaaaacacacctgtacctgcggatcctccaacggccttcaacaaggacaagctgaactctttcatcacccagtattctactggccaagtcagcgtggagatcgagtgggagctgcagaaggaaaacagcaagcgctggaacccggagatccagtacacttccaactattacaagtctaataatgttgaatttgctgttaatactgaaggtgtatatagtgaaccccgccccattggcacgcggtatttaacgaggaactta

SEQ ID NO: 86 - DNA, 2226 bp, synthetic construct
  source 1..2226: mol_type = other DNA
atggctgccgatggttatcttccagattggctcgaggacaaccttagtgaaggaattcgcgagtggtgggctttgaaacctggagcccctcaacccaaggcaaatcaacaacatcaagacaacgctcgaggtcttgtgcttccgggttacaaataccttggacccggcaacggactcgacaagggggagccggtcaacgcagcagacgcggcggccctcgagcacgacaaggcctacgaccagcagctcaaggccggagacaacccgtacctcaagtacaaccacgccgacgccgagttccaggagcggctcaaagaagatacgtcttttgggggcaacctcgggcgagcagtcttccaggccaaaaagaggcttcttgaacctcttggtctggttgaggaagcggctaagacggctcctggaaagaagaggcctgtagagcagtctcctcaggaaccggactcctccgcgggtattggcaaatcgggtgcacagcccgctaaaaagagactcaatttcggtcagactggcgacacagagtcagtcccagaccctcaaccaatcggagaacctcccgcagccccctcaggtgtgggatctcttacaatggcttcaggtggtggcgcaccagtggcagacaataacgaaggtgccgatggagtgggtagttcctcgggaaattggcattgcgattcccaatggctgggggacagagtcatcaccaccagcacccgaacctgggccctgcccacctacaacaatcacctctacaagcaaatctccaacagcacatctggaggatcttcaaatgacaacgcctacttcggctacagcaccccctgggggtattttgacttcaacagattccactgccacttctcaccacgtgactggcagcgactcatcaacaacaactggggattccggcctaagcgactcaacttcaagctcttcaacattcaggtcaaagaggttacggacaacaatggagtcaagaccatcgccaataaccttaccagcacggtccaggtcttcacggactcagactatcagctcccgtacgtgctcgggtcggctcacgagggctgcctcccgccgttcccagcggacgttttcatgattcctcagtacgggtatctgacgcttaatgatggaagccaggccgtgggtcgttcgtccttttactgcctggaatatttcccgtcgcaaatgctaagaacgggtaacaacttccagttcagctacgagtttgagaacgtacctttccatagcagctacgctcacagccaaagcctggaccgactaatgaatccactcatcgatcagtatctgtattacttgagtaagacgatgaatggtcatgattctccgcattctaaggcgcagaatcagcagacgttgaagttttcggtagctggtcctagcaacatggctgtccagggaagaaactacatacctggacccagctaccgacaacaacgtgtctcaaccactgtgactcaaaacaacaacagcgaatttgcttggcctggagcttcttcttgggctctcaatggacgtaatagcttgatgaatcctggacctgctatggccagccacaaagaaggagaggaccgtttctttcctttgtctggatctttaatttttggcaaacaaggaactggaagagacaacgtggatgcggacaaagtcatgataaccaacgaagaagaaattaaaactactaacccggtagcaacggagtcctatggacaagtggccacaaaccaccagagtgcccaagcacaggcgcagaccggctgggttcaaaaccaaggaatacttccgggtatggtttggcaggacagagatgtgtacctgcaaggacccatttgggccaaaattcctcacacggacggcaactttcacccttctccgctgatgggagggtttggaatgaagcacccgcctcctcagatcctcatcaaaaacacacctgtacctgcggatcctccaacggccttcaacaaggacaagctgaactctttcatcacccagtattctactggccaagtcagcgtggagatcgagtgggagctgcagaaggaaaacagcaagcgctggaacccggagatccagtacacttccaactattacaagtctaataatgttgaatttgctgttaatactgaaggtgtatatagtgaaccccgccccattggcacgcggtatttaacgaggaactta

SEQ ID NO: 87 - DNA, 2226 bp, synthetic construct
  source 1..2226: mol_type = other DNA
atggctgccgatggttatcttccagattggctcgaggacaaccttagtgaaggaattcgcgagtggtgggctttgaaacctggagcccctcaacccaaggcaaatcaacaacatcaagacaacgctcgaggtcttgtgcttccgggttacaaataccttggacccggcaacggactcgacaagggggagccggtcaacgcagcagacgcggcggccctcgagcacgacaaggcctacgaccagcagctcaaggccggagacaacccgtacctcaagtacaaccacgccgacgccgagttccaggagcggctcaaagaagatacgtcttttgggggcaacctcgggcgagcagtcttccaggccaaaaagaggcttcttgaacctcttggtctggttgaggaagcggctaagacggctcctggaaagaagaggcctgtagagcagtctcctcaggaaccggactcctccgcgggtattggcaaatcgggtgcacagcccgctaaaaagagactcaatttcggtcagactggcgacacagagtcagtcccagaccctcaaccaatcggagaacctcccgcagccccctcaggtgtgggatctcttacaatggcttcaggtggtggcgcaccagtggcagacaataacgaaggtgccgatggagtgggtagttcctcgggaaattggcattgcgattcccaatggctgggggacagagtcatcaccaccagcacccgaacctgggccctgcccacctacaacaatcacctctacaagcaaatctccaacagcacatctggaggatcttcaaatgacaacgcctacttcggctacagcaccccctgggggtattttgacttcaacagattccactgccacttctcaccacgtgactggcagcgactcatcaacaacaactggggattccggcctaagcgactcaacttcaagctcttcaacattcaggtcaaagaggttacggacaacaatggagtcaagaccatcgccaataaccttaccagcacggtccaggtcttcacggactcagactatcagctcccgtacgtgctcgggtcggctcacgagggctgcctcccgccgttcccagcggacgttttcatgattcctcagtacgggtatctgacgcttaatgatggaagccaggccgtgggtcgttcgtccttttactgcctggaatatttcccgtcgcaaatgctaagaacgggtaacaacttccagttcagctacgagtttgagaacgtacctttccatagcagctacgctcacagccaaagcctggaccgactaatgaatccactcatcgatcagtatctgtattacttgagtaagacgattgatggtcatgattctccgcattctaaggcgcagaatcagcagacgttgaagttttcggtagctggtcctagcaacatggctgtccagggaagaaactacatacctggacccagctaccgacaacaacgtgtctcaaccactgtgactcaaaacaacaacagcgaatttgcttggcctggagcttcttcttgggctctcaatggacgtaatagcttgatgaatcctggacctgctatggccagccacaaagaaggagaggaccgtttctttcctttgtctggatctttaatttttggcaaacaaggaactggaagagacaacgtggatgcggacaaagtcatgataaccaacgaagaagaaattaaaactactaacccggtagcaacggagtcctatggacaagtggccacaaaccaccagagtgcccaagcacaggcgcagaccggctgggttcaaaaccaaggaatacttccgggtatggtttggcaggacagagatgtgtacctgcaaggacccatttgggccaaaattcctcacacggacggcaactttcacccttctccgctgatgggagggtttggaatgaagcacccgcctcctcagatcctcatcaaaaacacacctgtacctgcggatcctccaacggccttcaacaaggacaagctgaactctttcatcacccagtattctactggccaagtcagcgtggagatcgagtgggagctgcagaaggaaaacagcaagcgctggaacccggagatccagtacacttccaactattacaagtctaataatgttgaatttgctgttaatactgaaggtgtatatagtgaaccccgccccattggcacgcggtatttaacgaggaactta

SEQ ID NO: 88 - DNA, 2226 bp, synthetic construct
  source 1..2226: mol_type = other DNA
atggctgccgatggttatcttccagattggctcgaggacaaccttagtgaaggaattcgcgagtggtgggctttgaaacctggagcccctcaacccaaggcaaatcaacaacatcaagacaacgctcgaggtcttgtgcttccgggttacaaataccttggacccggcaacggactcgacaagggggagccggtcaacgcagcagacgcggcggccctcgagcacgacaaggcctacgaccagcagctcaaggccggagacaacccgtacctcaagtacaaccacgccgacgccgagttccaggagcggctcaaagaagatacgtcttttgggggcaacctcgggcgagcagtcttccaggccaaaaagaggcttcttgaacctcttggtctggttgaggaagcggctaagacggctcctggaaagaagaggcctgtagagcagtctcctcaggaaccggactcctccgcgggtattggcaaatcgggtgcacagcccgctaaaaagagactcaatttcggtcagactggcgacacagagtcagtcccagaccctcaaccaatcggagaacctcccgcagccccctcaggtgtgggatctcttacaatggcttcaggtggtggcgcaccagtggcagacaataacgaaggtgccgatggagtgggtagttcctcgggaaattggcattgcgattcccaatggctgggggacagagtcatcaccaccagcacccgaacctgggccctgcccacctacaacaatcacctctacaagcaaatctccaacagcacatctggaggatcttcaaatgacaacgcctacttcggctacagcaccccctgggggtattttgacttcaacagattccactgccacttctcaccacgtgactggcagcgactcatcaacaacaactggggattccggcctaagcgactcaacttcaagctcttcaacattcaggtcaaagaggttacggacaacaatggagtcaagaccatcgccaataaccttaccagcacggtccaggtcttcacggactcagactatcagctcccgtacgtgctcgggtcggctcacgagggctgcctcccgccgttcccagcggacgttttcatgattcctcagtacgggtatctgacgcttaatgatggaagccaggccgtgggtcgttcgtccttttactgcctggaatatttcccgtcgcaaatgctaagaacgggtaacaacttccagttcagctacgagtttgagaacgtacctttccatagcagctacgctcacagccaaagcctggaccgactaatgaatccactcatcgatcagtatctgtattacttgagtaagacgaataatggtcatgattctccgcattctaaggcgcagaatcagcagacgttgaagttttcggtagctggtcctagcaacatggctgtccagggaagaaactacatacctggacccagctaccgacaacaacgtgtctcaaccactgtgactcaaaacaacaacagcgaatttgcttggcctggagcttcttcttgggctctcaatggacgtaatagcttgatgaatcctggacctgctatggccagccacaaagaaggagaggaccgtttctttcctttgtctggatctttaatttttggcaaacaaggaactggaagagacaacgtggatgcggacaaagtcatgataaccaacgaagaagaaattaaaactactaacccggtagcaacggagtcctatggacaagtggccacaaaccaccagagtgcccaagcacaggcgcagaccggctgggttcaaaaccaaggaatacttccgggtatggtttggcaggacagagatgtgtacctgcaaggacccatttgggccaaaattcctcacacggacggcaactttcacccttctccgctgatgggagggtttggaatgaagcacccgcctcctcagatcctcatcaaaaacacacctgtacctgcggatcctccaacggccttcaacaaggacaagctgaactctttcatcacccagtattctactggccaagtcagcgtggagatcgagtgggagctgcagaaggaaaacagcaagcgctggaacccggagatccagtacacttccaactattacaagtctaataatgttgaatttgctgttaatactgaaggtgtatatagtgaaccccgccccattggcacgcggtatttaacgaggaactta

SEQ ID NO: 89 - protein, 19 aa, synthetic construct
MGWTLVFLFLLSVTAGVHS

SEQ ID NO: 90 - DNA, 57 bp, synthetic construct
  source 1..57: mol_type = other DNA
atgggctggaccctggtgtttctcttcctgctgagcgtgaccgccggcgtgcacagc

SEQ ID NO: 91 - protein, 20 aa, synthetic construct
MVSSAQFLGLLLLCFQGTRC

SEQ ID NO: 92 - DNA, 60 bp, synthetic construct
  source 1..60: mol_type = other DNA
atggtgagcagcgctcagttcctgggcctgctgctgctgtgttttcaaggcacaagatgt

SEQ ID NO: 93 - DNA, 60 bp, synthetic construct
  source 1..60: mol_type = other DNA
atggtgagcagcgctcagttcctgggcctgctgctgctgtgcttccaaggcacaagatgc

SEQ ID NO: 94 - DNA, 60 bp, synthetic construct
  source 1..60: mol_type = other DNA
atggtgagcagcgctcagttcctgggcctgctgctgctgtgtttccaagggacaagatgt

SEQ ID NO: 95 - protein, 10 aa, synthetic construct
GYTFTNYWIN

SEQ ID NO: 96 - protein, 131 aa, synthetic construct
LPEVKLEESGAELVKPGASVKLSCKASGYTFISNWMHWVKQRPGQGLEWIGNIDPSDSETHYNQKFKDKATLTVDKSSSTAYMQLSSLTSEDSAVYYCARRDRDGYYFDYWGQGTTLTVSSAKTTPPSVYS

SEQ ID NO: 97 - protein, 125 aa, synthetic construct
LPEVKLEQSGAELVKPGASVKLSCKASGYTFTNYWINWVKQRPGQGLEWIGNIYPGSTRANYNEKFKSKATLTVDTSSSTAYMQVSSLTSDDSAVYYCTRTHSIWGQGTQVTVSAAKTTPPSVYS

SEQ ID NO: 98 - protein, 439 aa, synthetic construct
QVQLQQSDAELVKPGASVKISCKASGYTFTDRTIHWVKQRPEQGLEWIGYIYPGDGSTKYNENFKGKATLTADKSSSTAYMQLNSLTSEDSAVYFCARRGAMDYWGQGTSVTVSSAKTTPPSVYPLAPGSAAQTNSMVTLGCLVKGYFPEPVTVTWNSGSLSSGVHTFPAVLQSDLYTLSSSVTVPSSTWPSETVTCNVAHPASSTKVDKKIVPRDCGCKPCICTVPEVSSVFIFPPKPKDVLTITLTPKVTCVVVDISKDDPEVQFSWFVDDVEVHTAQTQPREEQFNSTFRSVSELPIMHQDWLNGKEFKCRVNSAAFPAPIEKTISKTKGRPKAPQVYTIPPPKEQMAKDKVSLTCMITDFFPEDITVEWQWNGQPAENYKNTQPIMDTDGSYFVYSKLNVQKSNWEAGNTFTCSVLHEGLHNHHTEKSLSHSPGK

SEQ ID NO: 99 - protein, 115 aa, synthetic construct
QVQLQQSDAELVKPGASVKISCKASGYTFTDRTIHWVKQRPEQGLEWIGYIYPGDGSTKYNENFKGKATLTADKSSSTAYMQLNSLTSEDSAVYFCARRGAMDYWGQGTSVTVSS

SEQ ID NO: 100 - DNA, 345 bp, synthetic construct
  source 1..345: mol_type = other DNA
caggtgcagctgcagcagagcgacgccgagctggtgaagcccggcgccagcgtgaagatcagctgcaaggccagcggctacaccttcaccgacaggaccatccactgggtgaagcagaggcccgagcagggcctggagtggatcggctacatctaccccggcgacggcagcaccaagtacaacgagaacttcaagggcaaggccaccctgaccgccgacaagagcagcagcaccgcctacatgcagctgaacagcctgaccagcgaggacagcgccgtgtacttctgcgccaggaggggcgcgatggactactggggccagggcaccagcgtgaccgtgagcagc

SEQ ID NO: 101 - DNA, 345 bp, synthetic construct
  source 1..345: mol_type = other DNA
caggtgcagctgcagcagagcgacgccgagctggtgaagcccggcgccagcgtgaagatcagctgcaaggccagcggctacaccttcaccgaccggaccatccactgggtgaagcagcggcccgagcagggcctggagtggatcggctacatctaccccggcgacggcagcaccaagtacaacgagaacttcaagggcaaggccaccctgaccgccgacaagagcagcagcaccgcctacatgcagctgaacagcctgaccagcgaggacagcgccgtgtacttctgcgcccggcggggcgctatggactactggggccagggcaccagcgtgaccgtgagcagc

SEQ ID NO: 102 - DNA, 345 bp, synthetic construct
  source 1..345: mol_type = other DNA
caggtgcagctgcagcagagcgacgccgagctggtgaagcccggcgccagcgtgaagatcagctgcaaggccagcggctacaccttcaccgaccgaaccatccactgggtgaagcagcgacccgagcagggcctggagtggatcggctacatctaccccggcgacggcagcaccaagtacaacgagaacttcaagggcaaggccaccctgaccgccgacaagagcagcagcaccgcctacatgcagctgaacagcctgaccagcgaggacagcgccgtgtacttctgcgcccgacgaggcgctatggactactggggccagggcaccagcgtgaccgtgagcagc

SEQ ID NO: 103 - DNA, 345 bp, synthetic construct
  source 1..345: mol_type = other DNA
caggtgcagctgcagcagagcgatgccgagctggtgaaacctggggccagcgtcaagatcagctgcaaggcctccgggtacaccttcaccgaccgcaccatccactgggtgaagcagcggcccgagcaggggctggagtggatcggctacatctaccccggggacggcagcaccaagtacaacgagaacttcaagggcaaggccaccctgaccgccgacaagtccagcagcacggcctacatgcagctcaacagcctcaccagcgaggacagcgccgtgtacttctgcgcccggcggggcgcaatggactactggggccagggcacctccgtgaccgtgtcctcc

SEQ ID NO: 104 - DNA, 345 bp, synthetic construct
  source 1..345: mol_type = other DNA
caggtgcagctgcagcagagcgatgccgagctggtgaaacccggggcctccgtcaagatcagctgcaaggccagcgggtacaccttcaccgaccgcaccatccactgggtgaagcagcggcccgagcagggcctggagtggatcggctacatctaccccggggacggcagcaccaagtacaacgagaacttcaagggcaaggccaccctgaccgccgacaagtccagcagcacagcctacatgcagctcaacagcctcacctctgaggacagcgccgtgtacttctgcgcccggcggggcgcgatggactactggggccaggggaccagcgtgaccgtgtcctcc

SEQ ID NO: 105 - DNA, 345 bp, synthetic construct
  source 1..345: mol_type = other DNA
caggtgcagctgcagcagagcgacgccgagctggtgaaacctggggccagcgtcaagatcagctgcaaggcctccggctacaccttcaccgaccgcaccatccactgggtgaagcagcggcccgagcaggggctggagtggatcgggtacatctaccccggggacggctccaccaagtacaacgagaacttcaagggcaaagccaccctgacggccgacaagtccagcagcaccgcctacatgcagctgaacagcctgaccagcgaggacagcgccgtgtacttctgcgcccggcggggggctatggactactggggccagggcacctccgtgaccgtgtcctcc

SEQ ID NO: 106 - DNA, 345 bp, synthetic construct
  source 1..345: mol_type = other DNA
caggtgcagctgcagcagtccgacgccgagctggtgaagcccggcgcctccgtgaagatctcctgcaaggcctccggctacaccttcaccgaccggaccatccactgggtgaagcagcggcccgagcagggcctggagtggatcggctacatctaccccggcgacggctccaccaagtacaacgagaacttcaagggcaaggccaccctgaccgccgacaagtcctcctccaccgcctacatgcagctgaactccctgacctccgaggactccgccgtgtacttctgcgcccggcggggcgctatggactactggggccagggcacctccgtgaccgtgtcctcc

SEQ ID NO: 107 - DNA, 345 bp, synthetic construct
  source 1..345: mol_type = other DNA
caggtgcagctgcagcagtccgatgccgagctggtgaaaccgggggccagcgtcaagatctcatgcaaagcttccggctacaccttcaccgacagaaccatccactgggtgaagcagcggcccgagcaggggctggagtggatcgggtacatctaccccggggacggcagcaccaagtacaacgagaacttcaagggcaaggccaccctgacagccgacaagtccagctccaccgcctacatgcagctcaacagcctgacctccgaggacagcgccgtgtacttctgcgcccggcggggcgcaatggactactggggccagggcaccagcgtgaccgtgagcagc

SEQ ID NO: 108 - DNA, 345 bp, synthetic construct
  source 1..345: mol_type = other DNA
caggtgcagctgcagcagagcgacgccgagctggtgaagcctggcgccagcgtgaagatcagctgcaaggccagcggctacaccttcaccgaccgtaccatccactgggtgaagcagcgacctgagcagggcctggagtggatcggctacatctaccctggcgacggcagcaccaagtacaacgagaacttcaagggcaaggccaccctgaccgccgacaagagcagcagcaccgcctacatgcagctgaacagcctgaccagcgaggacagcgccgtgtacttctgcgcccgtcgaggcgctatggactactggggccagggcaccagcgtgaccgtgagcagc

SEQ ID NO: 109 - DNA, 345 bp, synthetic construct
  source 1..345: mol_type = other DNA
caggtgcagctgcagcagagcgacgccgagctggtgaagcctggcgccagcgtgaagatcagctgcaaggccagcggctacaccttcaccgaccgtaccatccactgggtgaagcagcgacctgagcagggcctggagtggatcggctacatctaccccggcgacggcagcaccaagtacaacgagaacttcaagggcaaggccaccctgaccgccgacaagagcagcagcaccgcctacatgcagctgaacagcctgaccagcgaggacagcgccgtgtacttctgcgcccggcggggcgctatggactactggggccagggcaccagcgtgaccgtgagcagc

SEQ ID NO: 110 - protein, 439 aa, synthetic construct
QVQLQQSDAELVKPGASVKISCKASGYTFTDRTIHWVKQRPEQGLEWIGYIYPGDDSTKYNDMFKAKATLTADKSSNTAYMQLNSLTSDDSAVYFCARRGTMDYWGQGTSVTVSSAKTTPPSVYPLAPGSAAQTNSMVTLGCLVKGYFPEPVTVTWNSGSLSSGVHTFPAVLQSDLYTLSSSVTVPSSTWPSETVTCNVAHPASSTKVDKKIVPRDCGCKPCICTVPEVSSVFIFPPKPKDVLTITLTPKVTCVVVDISKDDPEVQFSWFVDDVEVHTAQTQPREEQFNSTFRSVSELPIMHQDWLNGKEFKCRVNSAAFPAPIEKTISKTKGRPKAPQVYTIPPPKEQMAKDKVSLTCMITDFFPEDITVEWQWNGQPAENYKNTQPIMDTDGSYFVYSKLNVQKSNWEAGNTFTCSVLHEGLHNHHTEKSLSHSPGK

SEQ ID NO: 111 - protein, 439 aa, synthetic construct
QVQLQQSDAELVNPGASVKISCKASGYTFTDRTIHWVKQRPEQGLEWIGYIYPGDGSTKYNENFKGKATLTADKSSSTAYMQLNSLASEDSAVYFCARRGAMDYWGQGTSVTVSSAKTTPPSVYPLAPGSAAQTNSMVTLGCLVKGYFPEPVTVTWNSGSLSSGVHTFPAVLQSDLYTLSSSVTVPSSTWPSETVTCNVAHPASSTKVDKKIVPRDCGCKPCICTVPEVSSVFIFPPKPKDVLTITLTPKVTCVVVDISKDDPEVQFSWFVDDVEVHTAQTQPREEQFNSTFRSVSELPIMHQDWLNGKEFKCRVNSAAFPAPIEKTISKTKGRPKAPQVYTIPPPKEQMAKDKVSLTCMITDFFPEDITVEWQWNGQPAENYKNTQPIMDTDGSYFVYSKLNVQKSNWEAGNTFTCSVLHEGLHNHHTEKSLSHSPGK

SEQ ID NO: 112 - protein, 451 aa, synthetic construct
QVQLQQSGAELVRPGASVTLSCKASGNTFTDYEIHWVKQTPVHGLEWIGAIDPETGNTAYNQKFKGKARLTADKSSSTAYMELRSLTSEDSAVYYCTRSRGFDYWGQGTTLTVSSAKTTPPSVYPLAPGCGDTTGSSVTLGCLVKGYFPESVTVTWNSGSLSSSVHTFPALLQSGLYTMSSSVTVPSSTWPSQTVTCSVAHPASSTTVDKKLEPSGPISTINPCPPCKECHKCPAPNLEGGPSVFIFPPNIKDVLMISLTPKVTCVVVDVSEDDPDVRISWFVNNVEVHTAQTQTHREDYNSTIRVVSALPIQHQDWMSGKEFKCKVNNKDLPSPIERTISKIKGLVRAPQVYILPPPAEQLSRKDVSLTCLVVGFNPGDISVEWTSNGHTEENYKDTAPVLDSDGSYFIYSKLDIKTSKWEKTDSFSCNVRHEGLKNYYLKKTISRSPGK

SEQ ID NO: 113 - protein, 444 aa, synthetic construct
QVQLVQSGAEVVKPGASVKISCKASGYTFTDRTIHWVRQAPGQGLEWIGYIYPGDGSTKYSQKFQGRATLTADTSASTAYMELSSLRSEDTAVYYCARRGAMDYWGQGTSVTVSSASTKGPSVFPLAPSSKSTSGGTAALGCLVKDYFPEPVTVSWNSGALTSGVHTFPAVLQSSGLYSLSSVVTVPSSSLGTQTYICNVNHKPSNTKVDKRVEPKSCDKTHTCPPCPAPELLGGPSVFLFPPKPKDTLMISRTPEVTCVVVDVSHEDPEVKFNWYVDGVEVHNAKTKPREEQYNSTYRVVSVLTVLHQDWLNGKEYKCKVSNKALPAPIEKTISKAKGQPREPQVYTLPPSREEMTKNQVSLTCLVKGFYPSDIAVEWESNGQPENNYKTTPPVLDSDGSFFLYSKLTVDKSRWQQGNVFSCSVMHEALHNHYTQKSLSLSPG

SEQ ID NO: 114 - DNA, 351 bp, synthetic construct
  source 1..351: mol_type = other DNA
gaggtgcagttggtggagtctggggaagacttagtgaagcctggagggtccctgaaactctcctgtgtcgcttctggattcgctttcagtagctatggcatgtcttgggttcgccagactccagacatgaggctggagtgggtcgcaacaattagtagcagtggtagtcgcacctactttccagacagtgtgaaggggcgactcaccatctccagagacaatgacaagaacatcctatacctacaaatgagcagtctgaggtctgaggacacagccatgtactattgtacgattacctgggacggtgctatggactactggggtcgtggaatatcagtcaccgtctcctca

SEQ ID NO: 115 - protein, 117 aa, synthetic construct
EVQLVESGEDLVKPGGSLKLSCVASGFAFSSYGMSWVRQTPDMRLEWVATISSSGSRTYFPDSVKGRLTISRDNDKNILYLQMSSLRSEDTAMYYCTITWDGAMDYWGRGISVTVSS

SEQ ID NO: 116 - DNA, 1377 bp, synthetic construct
  source 1..1377: mol_type = other DNA
atgaacttcgggctcagcttgattttccttgtccttgttttaaaaggtgtccagtgtgaggttcatctggtggagtctgggggagccttagtgaagcctggagggtccctgaaactctcctgtgcagcctctggattcagtttcagtaaatatggcatgtcttgggttcgccagactccagacaagaggctggagtgggtcgcaaccattagtagtagtgggagtcgcacctactatccagacagtgtgaagggccaattcaccatctccagagacaatgccaagaacaccctgtacctgcaaatgagcagtctgaagtctgaggacacagccatgtattactgttcaattagctgggacggtgctatggactactggggtcaagggacctcagtcaccgtctcctcagccaaaacgacacccccatctgtctatccactggcccctggatctgctgcccaaactaactccatggtgaccctgggatgcctggtcaagggctatttccctgagccagtgacagtgacctggaactctggatccctgtccagcggtgtgcacaccttcccagctgtcctgcagtctgacctctacactctgagcagctcagtgactgtcccctccagcacctggcccagcgagaccgtcacctgcaacgttgcccacccggccagcagcaccaaggtggacaagaaaattgtgcccagggattgtggttgtaagccttgcatatgtacagtcccagaagtatcatctgtcttcatcttccccccaaagcccaaggatgtgctcaccattactctgactcctaaggtcacgtgtgttgtggtagacatcagcaaggatgatcccgaggtccagttcagctggtttgtagatgatgtggaggtgcacacagctcagacgcaaccccgggaggagcagttcaacagcactttccgctcagtcagtgaacttcccatcatgcaccaggactggctcaatggcaaggagttcaaatgcagggtcaacagtgcagctttccctgcccccatcgagaaaaccatctccaaaaccaaaggcagaccgaaggctccacaggtgtacaccattccacctcccaaggagcagatggccaaggataaagtcagtctgacctgcatgataacagacttcttccctgaagacattactgtggagtggcagtggaatgggcagccagcggagaactacaagaacactcagcccatcatggacacagatggctcttacttcgtctacagcaagctcaatgtgcagaagagcaactgggaggcaggaaatactttcacctgctctgtgttacatgagggcctgcacaaccaccatactgagaagagcctctcccactctcctggt

SEQ ID NO: 117 - DNA, 351 bp, synthetic construct
  source 1..351: mol_type = other DNA
gaggttcatctggtggagtctgggggagccttagtgaagcctggagggtccctgaaactctcctgtgcagcctctggattcagtttcagtaaatatggcatgtcttgggttcgccagactccagacaagaggctggagtgggtcgcaaccattagtagtagtgggagtcgcacctactatccagacagtgtgaagggccaattcaccatctccagagacaatgccaagaacaccctgtacctgcaaatgagcagtctgaagtctgaggacacagccatgtattactgttcaattagctgggacggtgctatggactactggggtcaagggacctcagtcaccgtctcctca

SEQ ID NO: 118 - protein, 117 aa, synthetic construct
EVHLVESGGALVKPGGSLKLSCAASGFSFSKYGMSWVRQTPDKRLEWVATISSSGSRTYYPDSVKGQFTISRDNAKNTLYLQMSSLKSEDTAMYYCSISWDGAMDYWGQGTSVTVSS

SEQ ID NO: 119 - protein, 30 aa, synthetic construct
  VARIANT 3: note = Any amino acid
EVXLVESGGALVKPGGSLRLSCAASGFSFS

SEQ ID NO: 120 - DNA, 351 bp, synthetic construct
  source 1..351: mol_type = other DNA
gaggttcatctggtggagtctgggggagccttagtgaagcctggagggtccctgagactctcctgtgcagcctctggattcagtttcagtaaatatggcatgtcttgggttcgccaggccccaggcaagggcctggagtgggtcgcaaccattagtagtagtgggagtcgcacctactatccagacagtgtgaagggcagattcaccatctccagagacaatgccaagaacaccctgtacctgcaaatgagcagtctgaagtctgaggacacagccatgtattactgttcaattagctgggacggtgctatggactactggggtcaagggacctcagtcaccgtctcctca

SEQ ID NO: 121 - protein, 117 aa, synthetic construct
EVHLVESGGALVKPGGSLRLSCAASGFSFSKYGMSWVRQAPGKGLEWVATISSSGSRTYYPDSVKGRFTISRDNAKNTLYLQMSSLKSEDTAMYYCSISWDGAMDYWGQGTSVTVSS

SEQ ID NO: 122 - DNA, 351 bp, synthetic construct
  source 1..351: mol_type = other DNA
gaggttcatctggtggagtctgggggagccttagtgaagcctggagggtccctgagactctcctgtgcagcctctggattcagtttcagtaaatatggcatgtcttgggttcgccaggccccaggcaagggcctggagtgggtcgcaaccattagtagtagtgggagtcgcacctactatccagacagtgtgaagggcagattcaccatctccagagacaatgccaagaacaccctgtacctgcaaatgaacagtctgagagccgaggacacagccatgtattactgttcaattagctgggacggtgctatggactactggggtcaagggaccaccgtcaccgtctcctca

SEQ ID NO: 123 - protein, 117 aa, synthetic construct
EVHLVESGGALVKPGGSLRLSCAASGFSFSKYGMSWVRQAPGKGLEWVATISSSGSRTYYPDSVKGRFTISRDNAKNTLYLQMNSLRAEDTAMYYCSISWDGAMDYWGQGTTVTVSS

SEQ ID NO: 124 - DNA, 351 bp, synthetic construct
  source 1..351: mol_type = other DNA
gaggttcagctggtggagtctgggggagccttagtgaagcctggagggtccctgagactctcctgtgcagcctctggattcagtttcagtaaatatggcatgtcttgggttcgccaggccccaggcaagggcctggagtgggtcgcaaccattagtagtagtgggagtcgcacctactatccagacagtgtgaagggcagattcaccatctccagagacaatgccaagaacaccctgtacctgcaaatgaacagtctgagagccgaggacacagccatgtattactgttcaattagctgggacggtgctatggactactggggtcaagggaccaccgtcaccgtctcctca

SEQ ID NO: 125 - protein, 117 aa, synthetic construct
EVQLVESGGALVKPGGSLRLSCAASGFSFSKYGMSWVRQAPGKGLEWVATISSSGSRTYYPDSVKGRFTISRDNAKNTLYLQMNSLRAEDTAMYYCSISWDGAMDYWGQGTTVTVSS

SEQ ID NO: 126 - DNA, 351 bp, synthetic construct
  source 1..351: mol_type = other DNA
gaggttcagctggtggagtctgggggagccttagtgaagcctggagggtccctgagactctcctgtgcagcctctggattcagtttcagtaaatatggcatgtcttgggttcgccaggccccaggcaagggcctggagtgggtcgcaaccattagtagtagtgggagtcgcacctactatccagacagtgtgaagggcagattcaccatctccagagacaatgccaagaacaccctgtacctgcaaatgaacagtctgagagccgaggacacagccatgtattactgtgccattagctgggacggtgctatggactactggggtcaagggaccaccgtcaccgtctcctca

SEQ ID NO: 127 - protein, 117 aa, synthetic construct
EVQLVESGGALVKPGGSLRLSCAASGFSFSKYGMSWVRQAPGKGLEWVATISSSGSRTYYPDSVKGRFTISRDNAKNTLYLQMNSLRAEDTAMYYCAISWDGAMDYWGQGTTVTVSS

SEQ ID NO: 128 - DNA, 1374 bp, synthetic construct
  source 1..1374: mol_type = other DNA
atggaatggacctgggtctttctcttcctcctgtcagtaactgcaggtgtccactcccaggttcagctgcagcagtctggagctgagctgatgaagcctggggcctcagtgaagatatcctgcaaggctactggctacacattcagtaactactggatagagtgggtaaagcagaggcctggacatggccttgagtggattggagagattttacctggaagtgatagtattaagtacaatgagaatttcaagggcaaggccacattcactgcagatacatcctccaacacagcctacatgcaactcagcagcctgacatctgaggactctgccgtctattactgtgcaagaagggggaactacccagactactggggccaaggcaccactctcacagtctcctcagccaaaacgacacccccatctgtctatccactggcccctggatctgctgcccaaactaactccatggtgaccctgggatgcctggtcaagggctatttccctgagccagtgacagtgacctggaactctggatccctgtccagcggtgtgcacaccttcccagctgtcctgcagtctgacctctacactctgagcagctcagtgactgtcccctccagcacctggcccagcgagaccgtcacctgcaacgttgcccacccggccagcagcaccaaggtggacaagaaaattgtgcccagggattgtggttgtaagccttgcatatgtacagtcccagaagtatcatctgtcttcatcttccccccaaagcccaaggatgtgctcaccattactctgactcctaaggtcacgtgtgttgtggtagacatcagcaaggatgatcccgaggtccagttcagctggtttgtagatgatgtggaggtgcacacagctcagacgcaaccccgggaggagcagttcaacagcactttccgctcagtcagtgaacttcccatcatgcaccaggactggctcaatggcaaggagttcaaatgcagggtcaacagtgcagctttccctgcccccatcgagaaaaccatctccaaaaccaaaggcagaccgaaggctccacaggtgtacaccattccacctcccaaggagcagatggccaaggataaagtcagtctgacctgcatgataacagacttcttccctgaagacattactgtggagtggcagtggaatgggcagccagcggagaactacaagaacactcagcccatcatggacacagatggctcttacttcgtctacagcaagctcaatgtgcagaagagcaactgggaggcaggaaatactttcacctgctctgtgttacatgagggcctgcacaaccaccatactgagaagagcctctcccactctcctggt

SEQ ID NO: 129 - DNA, 1326 bp, synthetic construct
  source 1..1326: mol_type = other DNA
gaggtgcagctggtgcagtctggagcagaggtgaaaaagcccggggagtctctgaagatctcctgtaagggttctggctacacattcagtaactactggatagagtgggtgcgccagatgcccgggaaaggcctggagtggatgggggagattttacctggaagtgatagtattaagtacgaaaagaatttcaagggccaggtcaccatctcagccgacaagtccatcagcaccgcctacctgcagtggagcagcctgaaggcctcggacaccgccatgtattactgtgcgagaagggggaactacgtggacgactggggccagggcaccctggtcaccgtctcctcagcttctaccaagggcccatcggtcttcccgctagcgccctgctccaggagcacctccgagagcacagccgccctgggctgcctggtcaaggactacttccccgaaccggtgacggtgtcgtggaactcaggcgccctgaccagcggcgtgcacaccttcccggctgtcctacagtcctcaggactctactccctcagcagcgtggtgaccgtgccctccagcagcttgggcacgaagacctacacctgcaacgtagatcacaagcccagcaacaccaaggtggacaagagagttgagtccaaatatggtcccccatgcccaccctgcccagcacctgaggccgccgggggaccatcagtcttcctgttccccccaaaacccaaggacactctcatgatctcccggacccctgaggtcacgtgcgtggtggtggacgtgagccaggaagaccccgaggtccagttcaactggtacgtggatggcgtggaggtgcataatgccaagacaaagccgcgggaggagcagttcaacagcacgtaccgtgtggtcagcgtcctcaccgtcctgcaccaggactggctgaacggcaaggagtacaagtgcaaggtctccaacaaaggcctcccgtcctccatcgagaaaaccatctccaaagccaaagggcagccccgagagccacaggtgtacaccctgcccccatcccaggaggagatgaccaagaaccaggtcagcctgacctgcctggtcaaaggcttctaccccagcgacatcgccgtggagtgggaaagcaatgggcagccggagaacaactacaagaccacgcctcccgtgctggactccgacggctccttcttcctctacagcaggctaaccgtggacaagagcaggtggcaggaggggaatgtcttctcatgctccgtgatgcatgaggctctgcacaaccactacacacagaagagcctctccctgtctctgggt

SEQ ID NO: 130 - protein, 458 aa, synthetic construct
MEWTWVFLFLLSVTAGVHSQVQLQQSGAELMKPGASVKISCKATGYTFSNYWIEWVKQRPGHGLEWIGEILPGSDSIKYNENFKGKATFTADTSSNTAYMQLSSLTSEDSAVYYCARRGNYPDYWGQGTTLTVSSAKTTPPSVYPLAPGSAAQTNSMVTLGCLVKGYFPEPVTVTWNSGSLSSGVHTFPAVLQSDLYTLSSSVTVPSSTWPSETVTCNVAHPASSTKVDKKIVPRDCGCKPCICTVPEVSSVFIFPPKPKDVLTITLTPKVTCVVVDISKDDPEVQFSWFVDDVEVHTAQTQPREEQFNSTFRSVSELPIMHQDWLNGKEFKCRVNSAAFPAPIEKTISKTKGRPKAPQVYTIPPPKEQMAKDKVSLTCMITDFFPEDITVEWQWNGQPAENYKNTQPIMDTDGSYFVYSKLNVQKSNWEAGNTFTCSVLHEGLHNHHTEKSLSHSPG

SEQ ID NO: 131 - protein, 442 aa, synthetic construct
EVQLVQSGAEVKKPGESLKISCKGSGYTFSNYWIEWVRQMPGKGLEWMGEILPGSDSIKYEKNFKGQVTISADKSISTAYLQWSSLKASDTAMYYCARRGNYVDDWGQGTLVTVSSASTKGPSVFPLAPCSRSTSESTAALGCLVKDYFPEPVTVSWNSGALTSGVHTFPAVLQSSGLYSLSSVVTVPSSSLGTKTYTCNVDHKPSNTKVDKRVESKYGPPCPPCPAPEAAGGPSVFLFPPKPKDTLMISRTPEVTCVVVDVSQEDPEVQFNWYVDGVEVHNAKTKPREEQFNSTYRVVSVLTVLHQDWLNGKEYKCKVSNKGLPSSIEKTISKAKGQPREPQVYTLPPSQEEMTKNQVSLTCLVKGFYPSDIAVEWESNGQPENNYKTTPPVLDSDGSFFLYSRLTVDKSRWQEGNVFSCSVMHEALHNHYTQKSLSLSLG

SEQ ID NO: 132 - protein, 116 aa, synthetic construct
EVQLVQSGAEVKKPGESLKISCKGSGYTFSNYWIEWVRQMPGKGLEWMGEILPGSDSIKYEKNFKGQVTISADKSISTAYLQWSSLKASDTAMYYCARRGNYVDDWGQGTLVTVSS

SEQ ID NO: 133 - DNA, 1320 bp, synthetic construct
  source 1..1320: mol_type = other DNA
gaggtccagctgcaacagtctggacctgagctggtgaagcctggggcttcagtgaagatatcctgcaagacttctggatacacattcactgaatacaccatacactgggtgaagcagagccatggagagagccttgagtggattggaggtattaatccaaacgatggtggtactatttacaaccagaagttcaagggcaaggccacattgactgtagacaagtcctccaaaacagcctacatggagctccgcagcctgacatctgaggattctgcagtcttttactgtgcaagagggccctccgccaggtttccttactggggccaagggactctggtcactgtctctgcagccaaaacgacacccccatctgtctatccactggcccctggatctgctgcccaaactaactccatggtgaccctgggatgcctggtcaagggctatttccctgagccagtgacagtgacctggaactctggatccctgtccagcggtgtgcacaccttcccagctgtcctgcagtctgacctctacactctgagcagctcagtgactgtcccctccagcacctggcccagcgagaccgtcacctgcaacgttgcccacccggccagcagcaccaaggtggacaagaaaattgtgcccagggattgtggttgtaagccttgcatatgtacagtcccagaagtatcatctgtcttcatcttccccccaaagcccaaggatgtgctcaccattactctgactcctaaggtcacgtgtgttgtggtagacatcagcaaggatgatcccgaggtccagttcagctggtttgtagatgatgtggaggtgcacacagctcagacgcaaccccgggaggagcagttcaacagcactttccgctcagtcagtgaacttcccatcatgcaccaggactggctcaatggcaaggagttcaaatgcagggtcaacagtgcagctttccctgcccccatcgagaaaaccatctccaaaaccaaaggcagaccgaaggctccacaggtgtacaccattccacctcccaaggagcagatggccaaggataaagtcagtctgacctgcatgataacagacttcttccctgaagacattactgtggagtggcagtggaatgggcagccagcggagaactacaagaacactcagcccatcatggacacagatggctcttacttcgtctacagcaagctcaatgtgcagaagagcaactgggaggcaggaaatactttcacctgctctgtgttacatgagggcctgcacaaccaccatactgagaagagcctctcccactctcctggt

SEQ ID NO: 134 - DNA, 1377 bp, synthetic construct
  source 1..1377: mol_type = other DNA
atgggatggagctggatctttctctttctcctgtcaggaactacaggtgtcctctctgaggtccagctgcaacagtctggacctgagctggtgaagcctggggcttcagtgaagatatcctgcaagacttctggatacacattcactgaatacaccatacactgggtgaagcagagccatggagagagccttgagtggattggaggtattaatccaaacgatggtggtactatttacaaccagaagttcaagggcaaggccacattgactgtagacaagtcctccaaaacagcctacatggagctccgcagcctgacatctgaggattctgcagtcttttactgtgcaagagggccctccgccaggtttccttactggggccaagggactctggtcactgtctctgcagccaaaacgacacccccatctgtctatccactggcccctggatctgctgcccaaactaactccatggtgaccctgggatgcctggtcaagggctatttccctgagccagtgacagtgacctggaactctggatccctgtccagcggtgtgcacaccttcccagctgtcctgcagtctgacctctacactctgagcagctcagtgactgtcccctccagcacctggcccagcgagaccgtcacctgcaacgttgcccacccggccagcagcaccaaggtggacaagaaaattgtgcccagggattgtggttgtaagccttgcatatgtacagtcccagaagtatcatctgtcttcatcttccccccaaagcccaaggatgtgctcaccattactctgactcctaaggtcacgtgtgttgtggtagacatcagcaaggatgatcccgaggtccagttcagctggtttgtagatgatgtggaggtgcacacagctcagacgcaaccccgggaggagcagttcaacagcactttccgctcagtcagtgaacttcccatcatgcaccaggactggctcaatggcaaggagttcaaatgcagggtcaacagtgcagctttccctgcccccatcgagaaaaccatctccaaaaccaaaggcagaccgaaggctccacaggtgtacaccattccacctcccaaggagcagatggccaaggataaagtcagtctgacctgcatgataacagacttcttccctgaagacattactgtggagtggcagtggaatgggcagccagcggagaactacaagaacactcagcccatcatggacacagatggctcttacttcgtctacagcaagctcaatgtgcagaagagcaactgggaggcaggaaatactttcacctgctctgtgttacatgagggcctgcacaaccaccatactgagaagagcctctcccactctcctggt

SEQ ID NO: 135 - DNA, 351 bp, synthetic construct
  source 1..351: mol_type = other DNA
gaggtccagctgcaacagtctggacctgagctggtgaagcctggggcttcagtgaagatatcctgcaagacttctggatacacattcactgaatacaccatacactgggtgaagcagagccatggagagagccttgagtggattggaggtattaatccaaacgatggtggtactatttacaaccagaagttcaagggcaaggccacattgactgtagacaagtcctccaaaacagcctacatggagctccgcagcctgacatctgaggattctgcagtcttttactgtgcaagagggccctccgccaggtttccttactggggccaagggactctggtcactgtctctgca

SEQ ID NO: 136 - DNA, 699 bp, synthetic construct
  source 1..699: mol_type = other DNA
atgggatggagctggatctttctctttctcctgtcaggaactacaggtgtcctctctgaggtccagctgcaacagtctggacctgagctggtgaagcctggggcttcagtgaagatatcctgcaagacttctggatacacattcactgaatacaccatacactgggtgaagcagagccatggagagagccttgagtggattggaggtattaatccaaacgatggtggtactatttacaaccagaagttcaagggcaaggccacattgactgtagacaagtcctccaaaacagcctacatggagctccgcagcctgacatctgaggattctgcagtcttttactgtgcaagagggccctccgccaggtttccttactggggccaagggactctggtcactgtctctgcagccaaaacgacacccccatctgtctatccactggcccctggatctgctgcccaaactaactccatggtgaccctgggatgcctggtcaagggctatttccctgagccagtgacagtgacctggaactctggatccctgtccagcggtgtgcacaccttcccagctgtcctgcagtctgacctctacactctgagcagctcagtgactgtcccctccagcacctggcccagcgagaccgtcacctgcaacgttgcccacccggccagcagcaccaaggtggacaagaaaatt

SEQ ID NO: 137 - DNA, 2211 bp, synthetic construct
  source 1..2211: mol_type = other DNA
atggctgccgatggttatcttccagattggctcgaggacaaccttagtgaaggaattcgcgagtggtgggctttgaaacctggagcccctcaacccaaggcaaatcaacaacatcaagacaacgctcgaggtcttgtgcttccgggttacaaataccttggacccggcaacggactcgacaagggggagccggtcaacgcagcagacgcggcggccctcgagcacgacaaggcctacgaccagcagctcaaggccggagacaacccgtacctcaagtacaaccacgccgacgccgagttccaggagcggctcaaagaagatacgtcttttgggggcaacctcgggcgagcagtcttccaggccaaaaagaggcttcttgaacctcttggtctggttgaggaagcggctaagacggctcctggaaagaagaggcctgtagagcagtctcctcaggaaccggactcctccgcgggtattggcaaatcgggtgcacagcccgctaaaaagagactcaatttcggtcagactggcgacacagagtcagtcccagaccctcaaccaatcggagaacctcccgcagccccctcaggtgtgggatctcttacaatggcttcaggtggtggcgcaccagtggcagacaataacgaaggtgccgatggagtgggtagttcctcgggaaattggcattgcgattcccaatggctgggggacagagtcatcaccaccagcacccgaacctgggccctgcccacctacaacaatcacctctacaagcaaatctccaacagcacatctggaggatcttcaaatgacaacgcctacttcggctacagcaccccctgggggtattttgacttcaacagattccactgccacttctcaccacgtgactggcagcgactcatcaacaacaactggggattccggcctaagcgactcaacttcaagctcttcaacattcaggtcaaagaggttacggacaacaatggagtcaagaccatcgccaataaccttaccagcacggtccaggtcttcacggactcagactatcagctcccgtacgtgctcgggtcggctcacgagggctgcctcccgccgttcccagcggacgttttcatgattcctcagtacgggtatctgacgcttaatgatggaagccaggccgtgggtcgttcgtccttttactgcctggaatatttcccgtcgcaaatgctaagaacgggtaacaacttccagttcagctacgagtttgagaacgtacctttccatagcagctacgctcacagccaaagcctggaccgactaatgaatccactcatcgaccaatacttgtactatctctcaaagactattaacggttctggacagaatcaacaaacgctaaaattcagtgtggccggacccagcaacatggctgtccagggaagaaactacatacctggacccagctaccgacaacaacgtgtctcaaccactgtgactcaaaacaacaacagcgaatttgcttggcctggagcttcttcttgggctctcaatggacgtaatagcttgatgaatcctggacctgctatggccagccacaaagaaggagaggaccgtttctttcctttgtctggatctttaatttttggcaaacaaggaactggaagagacaacgtggatgcggacaaagtcatgataaccaacgaagaagaaattaaaactactaacccggtagcaacggagtcctatggacaagtggccacaaaccaccagagtgcccaagcacaggcgcagaccggctgggttcaaaaccaaggaatacttccgggtatggtttggcaggacagagatgtgtacctgcaaggacccatttgggccaaaattcctcacacggacggcaactttcacccttctccgctgatgggagggtttggaatgaagcacccgcctcctcagatcctcatcaaaaacacacctgtacctgcggatcctccaacggccttcaacaaggacaagctgaactctttcatcacccagtattctactggccaagtcagcgtggagatcgagtgggagctgcagaaggaaaacagcaagcgctggaacccggagatccagtacacttccaactattacaagtctaataatgttgaatttgctgttaatactgaaggtgtatatagtgaaccccgccccattggcaccagatacctgactcgtaatctgtaa

SEQ ID NO: 138 - protein, 736 aa, synthetic construct
MAADGYLPDWLEDNLSEGIREWWALKPGAPQPKANQQHQDNARGLVLPGYKYLGPGNGLDKGEPVNAADAAALEHDKAYDQQLKAGDNPYLKYNHADAEFQERLKEDTSFGGNLGRAVFQAKKRLLEPLGLVEEAAKTAPGKKRPVEQSPQEPDSSAGIGKSGAQPAKKRLNFGQTGDTESVPDPQPIGEPPAAPSGVGSLTMASGGGAPVADNNEGADGVGSSSGNWHCDSQWLGDRVITTSTRTWALPTYNNHLYKQISNSTSGGSSNDNAYFGYSTPWGYFDFNRFHCHFSPRDWQRLINNNWGFRPKRLNFKLFNIQVKEVTDNNGVKTIANNLTSTVQVFTDSDYQLPYVLGSAHEGCLPPFPADVFMIPQYGYLTLNDGSQAVGRSSFYCLEYFPSQMLRTGNNFQFSYEFENVPFHSSYAHSQSLDRLMNPLIDQYLYYLSKTINGSGQNQQTLKFSVAGPSNMAVQGRNYIPGPSYRQQRVSTTVTQNNNSEFAWPGASSWALNGRNSLMNPGPAMASHKEGEDRFFPLSGSLIFGKQGTGRDNVDADKVMITNEEEIKTTNPVATESYGQVATNHQSAQAQAQTGWVQNQGILPGMVWQDRDVYLQGPIWAKIPHTDGNFHPSPLMGGFGMKHPPPQILIKNTPVPADPPTAFNKDKLNSFITQYSTGQVSVEIEWELQKENSKRWNPEIQYTSNYYKSNNVEFAVNTEGVYSEPRPIGTRYLTRNL

SEQ ID NO: 139 - DNA, 717 bp, synthetic construct
  source 1..717: mol_type = other DNA
atgggatggagctggatctttctctttctcctgtcaggaactacaggtgtcctctctgaggtccagctgcaacagtctggacctgagctggtgaagcctggggcttcagtgaagatatcctgcaagacttctggatacacattcactgaatacaccatacactgggtgaagcagagccatggagagagccttgagtggattggaggtattaatccaaacgatggtggtactatttacaaccagaagttcaagggcaaggccacattgactgtagacaagtcctccaaaacagcctacatggagctccgcagcctgacatctgaggattctgcagtcttttactgtgcaagagggccctccgccaggtttccttactggggccaagggactctggtcactgtctctgcagccaaaacgacacccccatctgtctatccactggcccctggatctgctgcccaaactaactccatggtgaccctgggatgcctggtcaagggctatttccctgagccagtgacagtgacctggaactctggatccctgtccagcggtgtgcacaccttcccagctgtcctgcagtctgacctctacactctgagcagctcagtgactgtcccctccagcacctggcccagcgagaccgtcacctgcaacgttgcccacccggccagcagcaccaaggtggacaagaaaattgtgcccagggattgtggt

SEQ ID NO: 140 - DNA, 744 bp, synthetic construct
  source 1..744: mol_type = other DNA
atgggatggagctggatctttctctttctcctgtcaggaactacaggtgtcctctctgaggtccagctgcaacagtctggacctgagctggtgaagcctggggcttcagtgaagatatcctgcaagacttctggatacacattcactgaatacaccatacactgggtgaagcagagccatggagagagccttgagtggattggaggtattaatccaaacgatggtggtactatttacaaccagaagttcaagggcaaggccacattgactgtagacaagtcctccaaaacagcctacatggagctccgcagcctgacatctgaggattctgcagtcttttactgtgcaagagggccctccgccaggtttccttactggggccaagggactctggtcactgtctctgcagccaaaacgacacccccatctgtctatccactggcccctggatctgctgcccaaactaactccatggtgaccctgggatgcctggtcaagggctatttccctgagccagtgacagtgacctggaactctggatccctgtccagcggtgtgcacaccttcccagctgtcctgcagtctgacctctacactctgagcagctcagtgactgtcccctccagcacctggcccagcgagaccgtcacctgcaacgttgcccacccggccagcagcaccaaggtggacaagaaaattgtgcccagggattgtggttgtaagccttgcatatgtacagtccca

SEQ ID NO: 141 - DNA, 753 bp, synthetic construct
  source 1..753: mol_type = other DNA
atgggatggagctggatctttctctttctcctgtcaggaactacaggtgtcctctctgaggtccagctgcaacagtctggacctgagctggtgaagcctggggcttcagtgaagatatcctgcaagacttctggatacacattcactgaatacaccatacactgggtgaagcagagccatggagagagccttgagtggattggaggtattaatccaaacgatggtggtactatttacaaccagaagttcaagggcaaggccacattgactgtagacaagtcctccaaaacagcctacatggagctccgcagcctgacatctgaggattctgcagtcttttactgtgcaagagggccctccgccaggtttccttactggggccaagggactctggtcactgtctctgcagccaaaacgacacccccatctgtctatccactggcccctggatctgctgcccaaactaactccatggtgaccctgggatgcctggtcaagggctatttccctgagccagtgacagtgacctggaactctggatccctgtccagcggtgtgcacaccttcccagctgtcctgcagtctgacctctacactctgagcagctcagtgactgtcccctccagcacctggcccagcgagaccgtcacctgcaacgttgcccacccggccagcagcaccaaggtggacaagaaaattgtgcccagggattgtggttgtaagccttgcatatgtacagtcccagaagtatca

SEQ ID NO: 142 - protein, 459 aa, synthetic construct
MGWSWIFLFLLSGTTGVLSEVQLQQSGPELVKPGASVKISCKTSGYTFTEYTIHWVKQSHGESLEWIGGINPNDGGTIYNQKFKGKATLTVDKSSKTAYMELRSLTSEDSAVFYCARGPSARFPYWGQGTLVTVSAAKTTPPSVYPLAPGSAAQTNSMVTLGCLVKGYFPEPVTVTWNSGSLSSGVHTFPAVLQSDLYTLSSSVTVPSSTWPSETVTCNVAHPASSTKVDKKIVPRDCGCKPCICTVPEVSSVFIFPPKPKDVLTITLTPKVTCVVVDISKDDPEVQFSWFVDDVEVHTAQTQPREEQFNSTFRSVSELPIMHQDWLNGKEFKCRVNSAAFPAPIEKTISKTKGRPKAPQVYTIPPPKEQMAKDKVSLTCMITDFFPEDITVEWQWNGQPAENYKNTQPIMDTDGSYFVYSKLNVQKSNWEAGNTFTCSVLHEGLHNHHTEKSLSHSPG

SEQ ID NO: 143 - DNA, 1383 bp, synthetic construct
  source 1..1383: mol_type = other DNA
atgggatggagctggatctttctctttctcctgtcaggaactacaggtgtcctctctgctgccgaggtccagctgcaacagtctggacctgagctggtgaagcctggggcttcagtgaagatatcctgcaagacttctggatacacattcactgaatacaccatacactgggtgaagcagagccatggagagagccttgagtggattggaggtattaatccaaacgatggtggtactatttacaaccagaagttcaagggcaaggccacattgactgtagacaagtcctccaaaacagcctacatggagctccgcagcctgacatctgaggattctgcagtcttttactgtgcaagagggccctccgccaggtttccttactggggccaagggactctggtcactgtctctgcagccaaaacgacacccccatctgtctatccactggcccctggatctgctgcccaaactaactccatggtgaccctgggatgcctggtcaagggctatttccctgagccagtgacagtgacctggaactctggatccctgtccagcggtgtgcacaccttcccagctgtcctgcagtctgacctctacactctgagcagctcagtgactgtcccctccagcacctggcccagcgagaccgtcacctgcaacgttgcccacccggccagcagcaccaaggtggacaagaaaattgtgcccagggattgtggttgtaagccttgcatatgtacagtcccagaagtatcatctgtcttcatcttccccccaaagcccaaggatgtgctcaccattactctgactcctaaggtcacgtgtgttgtggtagacatcagcaaggatgatcccgaggtccagttcagctggtttgtagatgatgtggaggtgcacacagctcagacgcaaccccgggaggagcagttcaacagcactttccgctcagtcagtgaacttcccatcatgcaccaggactggctcaatggcaaggagttcaaatgcagggtcaacagtgcagctttccctgcccccatcgagaaaaccatctccaaaaccaaaggcagaccgaaggctccacaggtgtacaccattccacctcccaaggagcagatggccaaggataaagtcagtctgacctgcatgataacagacttcttccctgaagacattactgtggagtggcagtggaatgggcagccagcggagaactacaagaacactcagcccatcatggacacagatggctcttacttcgtctacagcaagctcaatgtgcagaagagcaactgggaggcaggaaatactttcacctgctctgtgttacatgagggcctgcacaaccaccatactgagaagagcctctcccactctcctggt

SEQ ID NO: 144 - DNA, 357 bp, synthetic construct
  source 1..357: mol_type = other DNA
caggttcagctgcagcagtctggaactgagctgatgaagcctggggcctcagtgaagatatcctgcaaggctactggctacacattcagtagctcctggatggggtgggttaagcagaggcctggacatggccttgagtggattggagacattttacctggaagtggtggtactaactacaatgagaggttcaagggcaaggcctcattcactgcagaaacatcctccaacacagcctacatgcaactcagcagcctgacatctgaggactctgccgtctattactgtgtaagaagctactatgattacgaccgctttgctaactggggccaagggactctggtcactgtctctgca

SEQ ID NO: 145 - protein, 119 aa, synthetic construct
QVQLQQSGTELMKPGASVKISCKATGYTFSSSWMGWVKQRPGHGLEWIGDILPGSGGTNYNERFKGKASFTAETSSNTAYMQLSSLTSEDSAVYYCVRSYYDYDRFANWGQGTLVTVSA

SEQ ID NO: 146 - DNA, 354 bp, synthetic construct
  source 1..354: mol_type = other DNA
gaagtgaagctggtggagtctgggggagacttagtgaagcctggagggtccctgaaactctcctgtgcagcctctggattcactttcagtagctatgccatgtcttgggttcgccagaatccagagaagaggctggagtgggtcgcatccattagtaagggtggtaacacctactatccaaacagcgtgaagggccgattcaccatctccagagataatgccaggaacatcctgtacctgcaaatgagcagtctgaggtctgaggacacggccctttattactgtgcaagaggctggggtgattacgggtggtttgcttactggggccaagtgactctggtcactgtctctgca

SEQ ID NO: 147 - protein, 118 aa, synthetic construct
EVKLVESGGDLVKPGGSLKLSCAASGFTFSSYAMSWVRQNPEKRLEWVASISKGGNTYYPNSVKGRFTISRDNARNILYLQMSSLRSEDTALYYCARGWGDYGWFAYWGQVTLVTVSA

SEQ ID NO: 148 - DNA, 354 bp, synthetic construct
  source 1..354: mol_type = other DNA
gaagtgaaactggtggaaagcggcggcgatctggtgaaaccgggcggcagcctgaaactgagctgcgcggcgagcggctttacctttagcagctatgcgatgagctgggtgcgccagaacccggaaaaacgcctggaatgggtggcgagcattagcaaaggcggcaacacctattatccgaacagcgtgaaaggccgctttaccattagccgcgataacgcgcgcaacattctgtatctgcagatgagcagcctgcgcagcgaagataccgcgctgtattattgcgcgcgcggctggggcgattatggctggtttgcgtattggggccaggtgaccctggtgaccgtgagcgcg

SEQ ID NO: 149 - DNA, 354 bp, synthetic construct
  source 1..354: mol_type = other DNA
gaggtgaagctggtggagagcggaggagacctggtcaagcccgggggctccctgaagctcagctgtgccgccagcggcttcaccttctcctcctatgccatgtcctgggtccggcagaaccctgagaagaggctggagtgggtggcctccatctccaagggcggcaacacctactatcccaacagcgtgaaaggaagatttaccatcagccgggacaatgccaggaacatcctctacctgcagatgagcagcctgcggtctgaggacacagccctgtactactgcgcccggggctggggggactatggatggtttgcctactggggccaggtgaccctggttactgtgtctgcc

SEQ ID NO: 150 - DNA, 354 bp, synthetic construct
  source 1..354: mol_type = other DNA
gaggtgaagctggtggagagcggcggcgacctggtgaagcccggcggcagcctgaagctgagctgcgccgccagcggcttcaccttcagcagctacgccatgagctgggtgaggcagaaccccgagaagaggctggagtgggtggccagcatcagcaagggcggcaacacctactaccccaacagcgtgaagggcaggttcaccatcagcagggacaacgccaggaacatcctgtacctgcagatgagcagcctgaggagcgaggacaccgccctgtactactgcgccaggggctggggcgactacggctggttcgcctactggggccaggtgaccctggtgaccgtgagcgcc

SEQ ID NO: 151 - DNA, 354 bp, synthetic construct
  source 1..354: mol_type = other DNA
gaggtgaaacttgtggagagcggcggggacctggtcaagccaggcggcagcctgaagctgagctgtgccgcctccggcttcaccttcagcagctatgccatgtcctgggtccggcagaaccctgagaagaggctggagtgggtggccagcatcagcaaaggaggcaacacctactatcccaacagcgtgaagggccgcttcaccatctcccgggacaatgccaggaacatcctctacctgcagatgagctccctgcggtctgaggacacagccctgtactactgcgcccggggctggggagactatggatggtttgcctactggggccaggtgaccctggtgacagtgtctgcc

SEQ ID NO: 152 - DNA, 354 bp, synthetic construct
  source 1..354: mol_type = other DNA
gaggtgaagctggtggagtctggcggagacctggtgaagccaggcggaagcctgaagctgtcctgcgccgcttctggcttcacctttagctcctacgccatgagctgggtgcggcagaacccagagaagcgcctggagtgggtggcttccatctctaagggcggaaacacctactaccctaacagcgtgaagggaaggttcacaatctccagggataacgccagaaacatcctgtacctgcagatgtctagcctgaggtccgaggacacagccctgtactactgtgctcggggctggggagattacggctggtttgcctactggggacaggtgaccctggtgacagtgtctgct

SEQ ID NO: 153 - DNA, 354 bp, synthetic construct
  source 1..354: mol_type = other DNA
gaggtgaaacttgtggagagcggcggggacctggtgaagccaggcggcagcctgaagctgagctgtgccgcctccggcttcaccttcagcagctatgccatgtcctgggtccggcagaaccctgagaagaggctggagtgggtggccagcatcagcaaaggaggcaacacctactaccccaacagcgtcaagggccgcttcaccatctcccgggacaatgccaggaacatcctgtacctgcagatgagctccctgcggtctgaggacacagccctgtattactgcgcccggggctggggagactatggatggtttgcctactggggccaggtgaccctggtcaccgtgtctgcc

SEQ ID NO: 154 - DNA, 354 bp, synthetic construct
  source 1..354: mol_type = other DNA
gaggtgaaacttgtggagtctggaggagacctggtgaagccaggaggcagcctgaagctgagctgtgctgccagtggcttcaccttcagcagctatgccatgtcctgggtccggcagaaccctgagaagaggctggagtgggtggccagcatctccaagggcggcaacacctactatcccaacagcgtcaaaggaagatttaccatcagccgggacaatgccaggaacatcctctacctgcagatgagctccctgcggtctgaggacacagccctgtactactgtgcccggggctggggagattatggatggtttgcctactggggccaggtgaccctggtcactgtgtctgct

SEQ ID NO: 155 - DNA, 354 bp, synthetic construct
  source 1..354: mol_type = other DNA
gaggtgaaattagtggagtctggaggagacctggtgaagccaggaggcagcctgaagctgagctgtgctgcttctggcttcaccttcagcagctatgccatgtcctgggtcagacagaatcctgagaagagactggagtgggtggccagcatctccaaaggtggcaacacctactatcccaacagtgttaaaggaagatttaccatcagcagagataatgcaagaaacatcctctacctgcagatgtcttctttaagaagtgaagatacagccctgtactactgtgccagaggctggggagattatggatggtttgcctactggggccaggtgacattagttactgtgtctgct

SEQ ID NO: 156 - DNA, 354 bp, synthetic construct
  source 1..354: mol_type = other DNA
caagtgcagctggtggagagcggcgccgaggtgaagaagcctggcgctagcgtgaaggtgagctgcaaggctagcggcttcaccttcacaagatactggatgcactgggtgaaggagagacctggccacggcctggagtggatgggcaacatcaaccctaacaacggcggcaccgacttcaacgagaagttcaagaacagagtgaccatcaccgtgcacaagagcgcgtcgaccgcttacatggagctgagcagcctgagaagcgaggacaccgccgtgtactactgcgctagaggcaccggcaccggcgccatggactactggggccaaggcaccaccgtgaccgtctcgtcc

SEQ ID NO: 157 - DNA, 354 bp, synthetic construct
  source 1..354: mol_type = other DNA
caagtgcagctggtgcagagcggcgccgaggtgaagaagcctggcgctagcgtgaaggtgagctgcaaggctagcggcttcaccttcacaagatactggatgcactgggtgagagagagacctggccacggcctggagtggatcggcaacatcaaccctaacaacggcggcaccgacttcaacgagaagttcaagaacagagtgaccatgaccgtgcacaagagcatcagcaccgcctacatggagctgagcagcctgagaagcgacgacagcgccgtgtactactgcgctagaggcaccggcaccggcgccatggactactggggccaaggcaccctggtgacggtaagctcc

SEQ ID NO: 158 - DNA, 354 bp, synthetic construct
  source 1..354: mol_type = other DNA
caagtgcagctggtgcagagcggcgccgaggtgaagaagagcggcgctagcgtgaaggtgagctgcaaggctagcggcttcaccttcacaagatactggatgcactgggtgagacaagcccctggccaaggcctggagtggatcggcaacatcaaccctaacaacggcggcaccgacttcaacgagaagttcaagaacagagtgaccctgatcagagacacaagcaccaccaccgtgttcattcagctgacaagcctgacaagcgaggacagcgccgtgtactactgcgctagaggcaccggcaccggcgccatggactactggggccaaggcaccctggtgacggtaagctcc

SEQ ID NO: 159 - DNA, 354 bp, synthetic construct
  source 1..354: mol_type = other DNA
gaggtgcagctggtgcagagcggcgccgaggtgaagaagcctggcagcagcgtgaaggtgagctgcaaggctagcggcttcaccttcacaagatactggatgcactgggtgaaggagagacctggccacggcctggagtggatcggcaacatcaaccctaacaacggcggcaccgacttcaacgagaagttcaagaacagagtgaccatgaccgtgcacaagagcatcaccaccgcctacatggagctgagccggttaacctccgacgacagcgccgtgtactactgcgctagaggcaccggcaccggcgccatggactactggggccaaggcaccctggtgagcgtgagcagc

SEQ ID NO: 160 - DNA, 354 bp, synthetic construct
  source 1..354: mol_type = other DNA
caagtgcagctggtgcagagcggcgccgaggtgaagaagcctggcgctagcgtgaaggtgagctgcaaggctagcggcttcaccttcacaagatactggatgcactgggtgaaggagagacctggccaaggcctggagtggatgggcaacatcaaccctaacaacggcggcaccgacttcaacgagaagttcaagaacagagtgaccatgaccgtgcacaagagcacaagcaccgtgttcattcagctgagcagcctgagaagcgaggacaccgccgtgtactactgcgctagaggcaccggcaccggcgccatggactactggggccaaggcacaagcgtgacggtaagctcc

SEQ ID NO: 161 - DNA, 336 bp, synthetic construct
  source 1..336: mol_type = other DNA
gacgtggtgatgacacagagccctctgagcctgcctgtgaccctgggacagcctgctagcatcagctgcagaagctctcagagcctggtgcacaacaacggcatcacctacctgtactggtatcagcagagacctggacagagccctagactgctgatctacagagtgagcaacagattcagcggcgtgcctgacagattctccggctccggcagcggcaccgacttcaccctgaagatcagcagagtggaggccgaggacgtgggcgtgtactactgctttcaaggcacccatgtccctagaaccttcggccaaggcaccaagctggagatcaag

SEQ ID NO: 162 - DNA, 336 bp, synthetic construct
  source 1..336: mol_type = other DNA
gacatcgtgatgacacagagccctctgagcctgagcgtgacccctggacagcctgctagcatcagctgcagaagctctcagagcctggtgcacaacaacggcatcacctacctgtactggtacctgcagaagcctggacagagccctcagctgctgatctacagagtgagcaacagattcagcggcgtgcctgacagattctccggctccggcagcggcaccgacttcaccctgaagatcagcagagtggaggccgaggacgtgggcgtgtactactgctttcaaggcacccatgtccctagaaccttcggccaaggcaccaaggtggagatcaag

SEQ ID NO: 163 - DNA, 336 bp, synthetic construct
  source 1..336: mol_type = other DNA
gacatcgtgatgacacagacccctctcagcagccctgtgaccctaggacagcctgctagcatcagctgcagaagctctcagagcctggtgcacaacaacggcatcacctacctgtactggtatcagcagagacctggacagcctcctagactgctgatctacagagtgagcaacagattcagcggagtacctgacagatttagcggttccggcgccggcaccgacttcaccctgaagatcaacagagtggaggccgaggacgtgggcgtgtacttctgctttcaaggcacccatgtccctagaaccttcggccaaggcaccaagctggagatcaag

SEQ ID NO: 164 - DNA, 336 bp, synthetic construct
  source 1..336: mol_type = other DNA
gacatcgagatgacacagagccctctgagcctgcctgtgaccctgggacagcctgctagcatcagctgcagaagctctcagagcctggtgcacaacaacggcatcacctacctgtactggtatcagcagagacctggacagagccctagaagactgatctacagagtgagcaacagattcagcggcgtgcctgacagattctccggctccggcagcggcaccgacttcaccctgaagatcagcagagtggaggccgaggacgtgggcgtgtacttctgctttcaaggcacccatgtccctagaaccttcggcggcggcaccaagctggagatcaag

SEQ ID NO: 165 - DNA, 336 bp, synthetic construct
  source 1..336: mol_type = other DNA
gagatcgtgctgacacagagccctgcgacactgagcctgagccctggcgagagagctacgctgagctgccgcagctctcagagcctggtgcacaacaacggcatcacctacctgtactggtacctgcagaagcctggccaagcccctaagctgctgatctacagagtgagcaacagattcagcggcatccctgacagattctccggctccggccctggcaccgacttcaccctgaccatcagcagcctggagcctgaggacctggccgtgtacttctgcttccaaggcacccatgtacctagaaccttcggcggcggcaccaagctggagatcaag

SEQ ID NO: 166 - DNA, 354 bp, synthetic construct
  source 1..354: mol_type = other DNA
gaggtgaagctggtggagagcggcggggacctggtcaagcccgggggcagcctgaagctcagctgtgccgcctccggcttcaccttcagcagctatgccatgtcctgggtccggcagaaccctgagaagaggctggagtgggtggccagcatcagcaagggcggcaacacctactatcccaacagcgtgaaaggccgcttcaccatctcccgggacaatgccaggaacatcctgtacctgcagatgagctccctgcgcagcgaggacacagccctctactactgcgcccggggctggggagactatggatggtttgcctactggggccaggtgaccctggttactgtgtctgcc

SEQ ID NO: 167 - DNA, 354 bp, synthetic construct
  source 1..354: mol_type = other DNA
gaggtgaagctggtggagagcggcggcgacctggtgaagcctggcggcagcctgaagctgagctgcgccgccagcggcttcaccttcagcagctacgccatgagctgggtgagacagaaccctgagaagagactggagtgggtggccagcatcagcaagggcggcaacacctactaccctaacagcgtgaagggcagattcaccatcagcagagacaacgccagaaacatcctgtacctgcagatgagcagcctgagaagcgaggacaccgccctgtactactgcgccagaggctggggcgactacggctggttcgcctactggggccaggtgaccctggtgaccgtgagcgcc

SEQ ID NO: 168 - protein, 30 aa, synthetic construct
EVHLVESGGALVKPGGSLRLSCAASGFSFS

SEQ ID NO: 169 - DNA, 57 bp, synthetic construct
  source 1..57: mol_type = other DNA
atgaagttgcctgttaggctgttggtgctgatgttctggattcctgcttccagcagt

SEQ ID NO: 170 - protein, 445 aa, synthetic construct
QVQLVESGAEVKKPGASVKVSCKASGFTFTRYWMHWVKERPGHGLEWMGNINPNNGGTDFNEKFKNRVTITVHKSASTAYMELSSLRSEDTAVYYCARGTGTGAMDYWGQGTTVTVSSASTKGPSVFPLAPCSRSTSESTAALGCLVKDYFPEPVTVSWNSGALTSGVHTFPAVLQSSGLYSLSSVVTVPSSSLGTKTYTCNVDHKPSNTKVDKRVESKYGPPCPPCPAPEFLGGPSVFLFPPKPKDTLMISRTPEVTCVVVDVSQEDPEVQFNWYVDGVEVHNAKTKPREEQFNSTYRVVSVLTVLHQDWLNGKEYKCKVSNKGLPSSIEKTISKAKGQPREPQVYTLPPSQEEMTKNQVSLTCLVKGFYPSDIAVEWESNGQPENNYKTTPPVLDSDGSFFLYSRLTVDKSRWQEGNVFSCSVMHEALHNHYTQKSLSLSLGK

SEQ ID NO: 171 - protein, 445 aa, synthetic construct
QVQLVQSGAEVKKPGASVKVSCKASGFTFTRYWMHWVRERPGHGLEWIGNINPNNGGTDFNEKFKNRVTMTVHKSISTAYMELSSLRSDDSAVYYCARGTGTGAMDYWGQGTLVTVSSASTKGPSVFPLAPCSRSTSESTAALGCLVKDYFPEPVTVSWNSGALTSGVHTFPAVLQSSGLYSLSSVVTVPSSSLGTKTYTCNVDHKPSNTKVDKRVESKYGPPCPPCPAPEFLGGPSVFLFPPKPKDTLMISRTPEVTCVVVDVSQEDPEVQFNWYVDGVEVHNAKTKPREEQFNSTYRVVSVLTVLHQDWLNGKEYKCKVSNKGLPSSIEKTISKAKGQPREPQVYTLPPSQEEMTKNQVSLTCLVKGFYPSDIAVEWESNGQPENNYKTTPPVLDSDGSFFLYSRLTVDKSRWQEGNVFSCSVMHEALHNHYTQKSLSLSLGK

SEQ ID NO: 172 - protein, 445 aa, synthetic construct
QVQLVQSGAEVKKSGASVKVSCKASGFTFTRYWMHWVRQAPGQGLEWIGNINPNNGGTDFNEKFKNRVTLIRDTSTTTVFIQLTSLTSEDSAVYYCARGTGTGAMDYWGQGTLVTVSSASTKGPSVFPLAPCSRSTSESTAALGCLVKDYFPEPVTVSWNSGALTSGVHTFPAVLQSSGLYSLSSVVTVPSSSLGTKTYTCNVDHKPSNTKVDKRVESKYGPPCPPCPAPEFLGGPSVFLFPPKPKDTLMISRTPEVTCVVVDVSQEDPEVQFNWYVDGVEVHNAKTKPREEQFNSTYRVVSVLTVLHQDWLNGKEYKCKVSNKGLPSSIEKTISKAKGQPREPQVYTLPPSQEEMTKNQVSLTCLVKGFYPSDIAVEWESNGQPENNYKTTPPVLDSDGSFFLYSRLTVDKSRWQEGNVFSCSVMHEALHNHYTQKSLSLSLGK

SEQ ID NO: 173 - protein, 445 aa, synthetic construct
EVQLVQSGAEVKKPGSSVKVSCKASGFTFTRYWMHWVKERPGHGLEWIGNINPNNGGTDFNEKFKNRVTMTVHKSITTAYMELSRLTSDDSAVYYCARGTGTGAMDYWGQGTLVSVSSASTKGPSVFPLAPCSRSTSESTAALGCLVKDYFPEPVTVSWNSGALTSGVHTFPAVLQSSGLYSLSSVVTVPSSSLGTKTYTCNVDHKPSNTKVDKRVESKYGPPCPPCPAPEFLGGPSVFLFPPKPKDTLMISRTPEVTCVVVDVSQEDPEVQFNWYVDGVEVHNAKTKPREEQFNSTYRVVSVLTVLHQDWLNGKEYKCKVSNKGLPSSIEKTISKAKGQPREPQVYTLPPSQEEMTKNQVSLTCLVKGFYPSDIAVEWESNGQPENNYKTTPPVLDSDGSFFLYSRLTVDKSRWQEGNVFSCSVMHEALHNHYTQKSLSLSLGK

SEQ ID NO: 174 - protein, 445 aa, synthetic construct
QVQLVQSGAEVKKPGASVKVSCKASGFTFTRYWMHWVKERPGQGLEWMGNINPNNGGTDFNEKFKNRVTMTVHKSTSTVFIQLSSLRSEDTAVYYCARGTGTGAMDYWGQGTSVTVSSASTKGPSVFPLAPCSRSTSESTAALGCLVKDYFPEPVTVSWNSGALTSGVHTFPAVLQSSGLYSLSSVVTVPSSSLGTKTYTCNVDHKPSNTKVDKRVESKYGPPCPPCPAPEFLGGPSVFLFPPKPKDTLMISRTPEVTCVVVDVSQEDPEVQFNWYVDGVEVHNAKTKPREEQFNSTYRVVSVLTVLHQDWLNGKEYKCKVSNKGLPSSIEKTISKAKGQPREPQVYTLPPSQEEMTKNQVSLTCLVKGFYPSDIAVEWESNGQPENNYKTTPPVLDSDGSFFLYSRLTVDKSRWQEGNVFSCSVMHEALHNHYTQKSLSLSLGK

SEQ ID NO: 175 - protein, 219 aa, synthetic construct
DVVMTQSPLSLPVTLGQPASISCRSSQSLVHNNGITYLYWYQQRPGQSPRLLIYRVSNRFSGVPDRFSGSGSGTDFTLKISRVEAEDVGVYYCFQGTHVPRTFGQGTKLEIKRTVAAPSVFIFPPSDEQLKSGTASVVCLLNNFYPREAKVQWKVDNALQSGNSQESVTEQDSKDSTYSLSSTLTLSKADYEKHKVYACEVTHQGLSSPVTKSFNRGEC

SEQ ID NO: 176 - protein, 219 aa, synthetic construct
DIVMTQSPLSLSVTPGQPASISCRSSQSLVHNNGITYLYWYLQKPGQSPQLLIYRVSNRFSGVPDRFSGSGSGTDFTLKISRVEAEDVGVYYCFQGTHVPRTFGQGTKVEIKRTVAAPSVFIFPPSDEQLKSGTASVVCLLNNFYPREAKVQWKVDNALQSGNSQESVTEQDSKDSTYSLSSTLTLSKADYEKHKVYACEVTHQGLSSPVTKSFNRGEC

SEQ ID NO: 177 - protein, 219 aa, synthetic construct
DIVMTQTPLSSPVTLGQPASISCRSSQSLVHNNGITYLYWYQQRPGQPPRLLIYRVSNRFSGVPDRFSGSGAGTDFTLKINRVEAEDVGVYFCFQGTHVPRTFGQGTKLEIKRTVAAPSVFIFPPSDEQLKSGTASVVCLLNNFYPREAKVQWKVDNALQSGNSQESVTEQDSKDSTYSLSSTLTLSKADYEKHKVYACEVTHQGLSSPVTKSFNRGEC

SEQ ID NO: 178 - protein, 219 aa, synthetic construct
DIEMTQSPLSLPVTLGQPASISCRSSQSLVHNNGITYLYWYQQRPGQSPRRLIYRVSNRFSGVPDRFSGSGSGTDFTLKISRVEAEDVGVYFCFQGTHVPRTFGGGTKLEIKRTVAAPSVFIFPPSDEQLKSGTASVVCLLNNFYPREAKVQWKVDNALQSGNSQESVTEQDSKDSTYSLSSTLTLSKADYEKHKVYACEVTHQGLSSPVTKSFNRGEC

SEQ ID NO: 179 - protein, 219 aa, synthetic construct
EIVLTQSPATLSLSPGERATLSCRSSQSLVHNNGITYLYWYLQKPGQAPKLLIYRVSNRFSGIPDRFSGSGPGTDFTLTISSLEPEDLAVYFCFQGTHVPRTFGGGTKLEIKRTVAAPSVFIFPPSDEQLKSGTASVVCLLNNFYPREAKVQWKVDNALQSGNSQESVTEQDSKDSTYSLSSTLTLSKADYEKHKVYACEVTHQGLSSPVTKSFNRGEC

SEQ ID NO: 180 - DNA, 1335 bp, synthetic construct
  source 1..1335: mol_type = other DNA
caagtgcagctggtggagagcggcgccgaggtgaagaagcctggcgctagcgtgaaggtgagctgcaaggctagcggcttcaccttcacaagatactggatgcactgggtgaaggagagacctggccacggcctggagtggatgggcaacatcaaccctaacaacggcggcaccgacttcaacgagaagttcaagaacagagtgaccatcaccgtgcacaagagcgcgtcgaccgcttacatggagctgagcagcctgagaagcgaggacaccgccgtgtactactgcgctagaggcaccggcaccggcgccatggactactggggccaaggcaccaccgtgaccgtctcgtccgctagcacgaaaggtccaagcgttttccctctagccccttgcagcagaagcacaagcgagagcaccgccgccctgggctgccttgtaaaagattacttccctgagcctgtgaccgtgagttggaacagcggcgccctgacaagcggcgtgcacaccttccctgccgtgctgcagagcagcggcctgtacagcctgagcagcgtggtgaccgtgccaagcagcagcctgggcaccaagacctacacctgcaacgtggaccacaagcctagcaacaccaaggtggacaagagagtggagagcaagtacggtcctccgtgtcccccgtgccctgcccctgagttcctgggcggcccttcggtgtttctgtttccacctaagcctaaggacaccctgatgatcagcagaacccctgaggtgacctgcgtggtggtggacgtgagccaagaggaccctgaggtgcagttcaactggtacgtggacggcgtggaggtgcacaacgccaagaccaagcctagagaggagcagttcaacagcacctacagagtggtgagcgtgctgaccgtgctgcaccaagactggctgaacggcaaggagtacaagtgcaaggtgagcaacaagggcctgcctagttccattgagaagaccatcagcaaggccaagggacagcctagagagcctcaagtgtacaccctgcctcctagccaagaggagatgaccaagaaccaagtgagcctgacctgcctggtgaagggattctaccctagcgacatcgccgtggagtgggagagcaacggacagcctgagaacaactacaagaccacccctcctgtgctggacagcgacggcagcttcttcctgtacagcagactgaccgtggacaagagcagatggcaagagggcaacgtgttcagctgcagcgtgatgcacgaggccctgcacaaccactacacacagaagagcctgagcctgagcctgggcaag

SEQ ID NO: 181 - DNA, 1335 bp, synthetic construct
  source 1..1335: mol_type = other DNA
caagtgcagctggtgcagagcggcgccgaggtgaagaagcctggcgctagcgtgaaggtgagctgcaaggctagcggcttcaccttcacaagatactggatgcactgggtgagagagagacctggccacggcctggagtggatcggcaacatcaaccctaacaacggcggcaccgacttcaacgagaagttcaagaacagagtgaccatgaccgtgcacaagagcatcagcaccgcctacatggagctgagcagcctgagaagcgacgacagcgccgtgtactactgcgctagaggcaccggcaccggcgccatggactactggggccaaggcaccctggtgacggtaagctccgctagcaccaagggtcctagtgtatttcccctagccccttgcagcagaagcacaagcgagagcaccgccgccctgggctgcttggtgaaggactacttccctgagcctgtcacagtgtcctggaatagcggcgccctgacaagcggcgtgcacaccttccctgccgtgctgcagagcagcggcctgtacagcctgagcagcgtggtgaccgtgccttcgtcgagcctgggcaccaagacctacacctgcaacgtggaccacaagcctagcaacaccaaggtggacaagagagtggagagcaagtacggtcctccgtgtcccccgtgccctgcccctgagttcctgggcggccctagcgtgttcctatttccacctaagcctaaggacaccctgatgatcagcagaacccctgaggtgacctgcgtggtggtggacgtgagccaagaggaccctgaggtgcagttcaactggtacgtggacggcgtggaggtgcacaacgccaagaccaagcctagagaggagcagttcaacagcacctacagagtggtgagcgtgctgaccgtgctgcaccaagactggctgaacggcaaggagtacaagtgcaaggtgagcaacaagggcctgcctagcagtatcgagaagaccatcagcaaggccaagggacagcctagagagcctcaagtgtacaccctgcctcctagccaagaggagatgaccaagaaccaagtgagcctgacctgcctggtaaaaggtttctaccctagcgacatcgccgtggagtgggagagcaacggacagcctgagaacaactacaagaccacccctcctgtgctggacagcgacggcagcttcttcctgtacagcagactgaccgtggacaagagcagatggcaagagggcaacgtgttcagctgcagcgtgatgcacgaggccctgcacaaccactacacacagaagagcctgagcctgagcctgggcaag

SEQ ID NO: 182 - DNA, 1335 bp, synthetic construct
  source 1..1335: mol_type = other DNA
caagtgcagctggtgcagagcggcgccgaggtgaagaagagcggcgctagcgtgaaggtgagctgcaaggctagcggcttcaccttcacaagatactggatgcactgggtgagacaagcccctggccaaggcctggagtggatcggcaacatcaaccctaacaacggcggcaccgacttcaacgagaagttcaagaacagagtgaccctgatcagagacacaagcaccaccaccgtgttcattcagctgacaagcctgacaagcgaggacagcgccgtgtactactgcgctagaggcaccggcaccggcgccatggactactggggccaaggcaccctggtgacggtaagctccgctagcaccaagggtcctagtgtatttcccctagccccttgcagcagaagcacaagcgagagcaccgccgccctgggctgcttggtgaaggactacttccctgagcctgtcacagtgtcctggaatagcggcgccctgacaagcggcgtgcacaccttccctgccgtgctgcagagcagcggcctgtacagcctgagcagcgtggtgaccgtgccttcgtcgagcctgggcaccaagacctacacctgcaacgtggaccacaagcctagcaacaccaaggtggacaagagagtggagagcaagtacggtcctccgtgtcccccgtgccctgcccctgagttcctgggcggccctagcgtgttcctatttccacctaagcctaaggacaccctgatgatcagcagaacccctgaggtgacctgcgtggtggtggacgtgagccaagaggaccctgaggtgcagttcaactggtacgtggacggcgtggaggtgcacaacgccaagaccaagcctagagaggagcagttcaacagcacctacagagtggtgagcgtgctgaccgtgctgcaccaagactggctgaacggcaaggagtacaagtgcaaggtgagcaacaagggcctgcctagcagtatcgagaagaccatcagcaaggccaagggacagcctagagagcctcaagtgtacaccctgcctcctagccaagaggagatgaccaagaaccaagtgagcctgacctgcctggtaaaaggtttctaccctagcgacatcgccgtggagtgggagagcaacggacagcctgagaacaactacaagaccacccctcctgtgctggacagcgacggcagcttcttcctgtacagcagactgaccgtggacaagagcagatggcaagagggcaacgtgttcagctgcagcgtgatgcacgaggccctgcacaaccactacacacagaagagcctgagcctgagcctgggcaag

SEQ ID NO: 183 - DNA, 1335 bp, synthetic construct
  source 1..1335: mol_type = other DNA
gaggtgcagctggtgcagagcggcgccgaggtgaagaagcctggcagcagcgtgaaggtgagctgcaaggctagcggcttcaccttcacaagatactggatgcactgggtgaaggagagacctggccacggcctggagtggatcggcaacatcaaccctaacaacggcggcaccgacttcaacgagaagttcaagaacagagtgaccatgaccgtgcacaagagcatcaccaccgcctacatggagctgagccggttaacctccgacgacagcgccgtgtactactgcgctagaggcaccggcaccggcgccatggactactggggccaaggcaccctggtgagcgtgagcagcgctagcaccaagggtcctagtgtatttcccctagccccttgcagcagaagcacaagcgagagcaccgccgccctgggctgcttggtgaaggactacttccctgagcctgtgaccgtgagctggaacagcggcgccctgacaagcggcgtgcacaccttccctgccgtgctgcagagcagcggcctgtacagcctgagcagcgtggtgaccgtgccttcgtcgagcctgggcaccaagacctacacctgcaacgtggaccacaagcctagcaacaccaaggtggacaagagagtggagagcaagtacggtcctccgtgtcccccgtgccctgcccctgagttcctgggcggccctagcgtgttcctatttccacctaagcctaaggacaccctgatgatcagcagaacccctgaggtgacctgcgtggtggtggacgtgagccaagaggaccctgaggtgcagttcaactggtacgtggacggcgtggaggtgcacaacgccaagaccaagcctagagaggagcagttcaacagcacctacagagtggtgagcgtgctgaccgtgctgcaccaagactggctgaacggcaaggagtacaagtgcaaggtgagcaacaagggcctgcctagcagtatcgagaagaccatcagcaaggccaagggacagcctagagagcctcaagtgtacaccctgcctcctagccaagaggagatgaccaagaaccaagtgagcctgacctgcctggtaaaaggtttctaccctagcgacatcgccgtggagtgggagagcaacggacagcctgagaacaactacaagaccacccctcctgtgctggacagcgacggcagcttcttcctgtactcccgcctgacggttgacaagagcagatggcaagagggcaacgtgttcagctgcagcgtgatgcacgaggccctgcacaaccactacacacagaagagcctgagcctgagcctgggcaag

SEQ ID NO: 184 - DNA, 1335 bp, synthetic construct
  source 1..1335: mol_type = other DNA
caagtgcagctggtgcagagcggcgccgaggtgaagaagcctggcgctagcgtgaaggtgagctgcaaggctagcggcttcaccttcacaagatactggatgcactgggtgaaggagagacctggccaaggcctggagtggatgggcaacatcaaccctaacaacggcggcaccgacttcaacgagaagttcaagaacagagtgaccatgaccgtgcacaagagcacaagcaccgtgttcattcagctgagcagcctgagaagcgaggacaccgccgtgtactactgcgctagaggcaccggcaccggcgccatggactactggggccaaggcacaagcgtgacggtaagctccgctagcaccaagggtcctagtgtatttcccctagccccttgcagcagaagcacaagcgagagcaccgccgccctgggctgcttggtgaaggactacttccctgagcctgtcacagtgtcctggaatagcggcgccctgacaagcggcgtgcacaccttccctgccgtgctgcagagcagcggcctgtacagcctgagcagcgtggtgaccgtgccttcgtcgagcctgggcaccaagacctacacctgcaacgtggaccacaagcctagcaacaccaaggtggacaagagagtggagagcaagtacggtcctccgtgtcccccgtgccctgcccctgagttcctgggcggccctagcgtgttcctatttccacctaagcctaaggacaccctgatgatcagcagaacccctgaggtgacctgcgtggtggtggacgtgagccaagaggaccctgaggtgcagttcaactggtacgtggacggcgtggaggtgcacaacgccaagaccaagcctagagaggagcagttcaacagcacctacagagtggtgagcgtgctgaccgtgctgcaccaagactggctgaacggcaaggagtacaagtgcaaggtgagcaacaagggcctgcctagcagtatcgagaagaccatcagcaaggccaagggacagcctagagagcctcaagtgtacaccctgcctcctagccaagaggagatgaccaagaaccaagtgagcctgacctgcctggtaaaaggtttctaccctagcgacatcgccgtggagtgggagagcaacggacagcctgagaacaactacaagaccacccctcctgtgctggacagcgacggcagcttcttcctgtacagcagactgaccgtggacaagagcagatggcaagagggcaacgtgttcagctgcagcgtgatgcacgaggccctgcacaaccactacacacagaagagcctgagcctgagcctgggcaag

SEQ ID NO: 185 - DNA, 657 bp, synthetic construct
  source 1..657: mol_type = other DNA
gacgtggtgatgacacagagccctctgagcctgcctgtgaccctgggacagcctgctagcatcagctgcagaagctctcagagcctggtgcacaacaacggcatcacctacctgtactggtatcagcagagacctggacagagccctagactgctgatctacagagtgagcaacagattcagcggcgtgcctgacagattctccggctccggcagcggcaccgacttcaccctgaagatcagcagagtggaggccgaggacgtgggcgtgtactactgctttcaaggcacccatgtccctagaaccttcggccaaggcaccaagctggagatcaagagaaccgtggccgcccctagcgtgttcatcttccctcctagcgacgagcagctgaagagcggcaccgctagcgtggtgtgcctgctgaacaacttctaccctagagaggccaaggtgcagtggaaggtggacaacgccctgcagagcggcaacagccaagagagcgtgaccgagcaagacagcaaggacagcacctacagcctgagcagcaccctgaccctgagcaaggccgactacgagaagcacaaggtgtacgcctgcgaggtgacccaccaaggcctgagcagccctgtgaccaagagcttcaacagaggcgagtgc

SEQ ID NO: 186 - DNA, 657 bp, synthetic construct
  source 1..657: mol_type = other DNA
gacatcgtgatgacacagagccctctgagcctgagcgtgacccctggacagcctgctagcatcagctgcagaagctctcagagcctggtgcacaacaacggcatcacctacctgtactggtacctgcagaagcctggacagagccctcagctgctgatctacagagtgagcaacagattcagcggcgtgcctgacagattctccggctccggcagcggcaccgacttcaccctgaagatcagcagagtggaggccgaggacgtgggcgtgtactactgctttcaaggcacccatgtccctagaaccttcggccaaggcaccaaggtggagatcaagagaaccgtggccgcccctagcgtgttcatcttccctcctagcgacgagcagctgaagagcggcaccgctagcgtggtgtgcctgctgaacaacttctaccctagagaggccaaggtgcagtggaaggtggacaacgccctgcagagcggcaacagccaagagagcgtgaccgagcaagacagcaaggacagcacctacagcctgagcagcaccctgaccctgagcaaggccgactacgagaagcacaaggtgtacgcctgcgaggtgacccaccaaggcctgagcagccctgtgaccaagagcttcaacagaggcgagtgc

SEQ ID NO: 187 - DNA, 657 bp, synthetic construct
  source 1..657: mol_type = other DNA
gacatcgtgatgacacagacccctctcagcagccctgtgaccctaggacagcctgctagcatcagctgcagaagctctcagagcctggtgcacaacaacggcatcacctacctgtactggtatcagcagagacctggacagcctcctagactgctgatctacagagtgagcaacagattcagcggagtacctgacagatttagcggttccggcgccggcaccgacttcaccctgaagatcaacagagtggaggccgaggacgtgggcgtgtacttctgctttcaaggcacccatgtccctagaaccttcggccaaggcaccaagctggagatcaagagaaccgtggccgcccctagcgtgttcatcttccctcctagcgacgagcagctgaagagcggcaccgctagcgtggtgtgcctgctgaacaacttctaccctagagaggccaaggtgcagtggaaggtggacaacgccctgcagagcggcaacagccaagagagcgtgaccgagcaagacagcaaggacagcacctacagcctgagcagcaccctgaccctgagcaaggccgactacgagaagcacaaggtgtacgcctgcgaggtgacccaccaaggcctgtcaagccctgtaactaagagcttcaacagaggcgagtgc

SEQ ID NO: 188 - DNA, 657 bp, synthetic construct
  source 1..657: mol_type = other DNA
gacatcgagatgacacagagccctctgagcctgcctgtgaccctgggacagcctgctagcatcagctgcagaagctctcagagcctggtgcacaacaacggcatcacctacctgtactggtatcagcagagacctggacagagccctagaagactgatctacagagtgagcaacagattcagcggcgtgcctgacagattctccggctccggcagcggcaccgacttcaccctgaagatcagcagagtggaggccgaggacgtgggcgtgtacttctgctttcaaggcacccatgtccctagaaccttcggcggcggcaccaagctggagatcaagagaaccgtggccgcccctagcgtgttcatcttccctcctagcgacgagcagctgaagagcggcaccgctagcgtggtgtgcctgctgaacaacttctaccctagagaggccaaggtgcagtggaaggtggacaacgccctgcagagcggcaacagccaagagagcgtgaccgagcaagacagcaaggacagcacctacagcctgagcagcaccctgaccctgagcaaggccgactacgagaagcacaaggtgtacgcctgcgaggtgacccaccaaggcctgagcagccctgtgaccaagagcttcaacagaggcgagtgc

SEQ ID NO: 189 - DNA, 657 bp, synthetic construct
  source 1..657: mol_type = other DNA
gagatcgtgctgacacagagccctgcgacactgagcctgagccctggcgagagagctacgctgagctgccgcagctctcagagcctggtgcacaacaacggcatcacctacctgtactggtacctgcagaagcctggccaagcccctaagctgctgatctacagagtgagcaacagattcagcggcatccctgacagattctccggctccggccctggcaccgacttcaccctgaccatcagcagcctggagcctgaggacctggccgtgtacttctgcttccaaggcacccatgtacctagaaccttcggcggcggcaccaagctggagatcaagagaaccgtggccgcccctagcgtgttcatcttccctcctagcgacgagcagctgaagagcggcaccgctagcgtggtgtgcctgctgaacaacttctaccctagagaggccaaggtgcagtggaaggtggacaacgccctgcagagcggcaacagccaagagagcgtgaccgagcaagacagcaaggacagcacctacagcctgagcagcaccctgaccctgagcaaggccgactacgagaagcacaaggtgtacgcctgcgaggtgacccaccaaggcctgagcagccctgtgaccaagagcttcaacagaggcgagtgc

SEQ ID NO: 190 - DNA, 356 bp, synthetic construct
  source 1..356: mol_type = other DNA
caagtgcagctgcagcaaccgggcacagagctggtgaagcctggcagcagcgtgaacctgagctgcaaggctagcggcttcaccttcacaagatactggatgcactgggtgaaggagagacctggccacggcctggagtggatcggcaacatcaaccctaacaacggcggcaccgacttcaacgagaagttcaagaacaaggccaccctgaccgtgcacaagagcagcaccaccgtgttcattcagctgagcagcctgacaagcgaggacagcgccgtgtactactgcgctagaggcaccggcaccggcgccatggactactggggccaaggcacaagcgtgaccgtgtcgtcggc

SEQ ID NO: 191 - DNA, 1335 bp, synthetic construct
  source 1..1335: mol_type = other DNA
caagtgcagctgcagcaaccgggcacagagctggtgaagcctggcagcagcgtgaacctgagctgcaaggctagcggcttcaccttcacaagatactggatgcactgggtgaaggagagacctggccacggcctggagtggatcggcaacatcaaccctaacaacggcggcaccgacttcaacgagaagttcaagaacaaggccaccctgaccgtgcacaagagcagcaccaccgtgttcattcagctgagcagcctgacaagcgaggacagcgccgtgtactactgcgctagaggcaccggcaccggcgccatggactactggggccaaggcacaagcgtgaccgtgtcgtcggctagcaccaagggtccttccgtgtttcctctagccccttgcagcagaagcacaagcgagagcaccgccgccctgggctgcctggttaaagattatttccctgagcctgtgaccgtgagctggaatagcggcgccctgacaagcggcgtgcacaccttccctgccgtgctgcagagcagcggcctgtacagcctgagcagcgtggtgaccgtgccttctagcagcctgggtactaagacctacacctgcaacgtggaccacaagcctagcaacaccaaggtggacaagagagtggagagcaagtacggtcctccgtgtcccccgtgccctgcccctgagttcctgggcggccctagcgttttcttgtttccacctaagcctaaggacaccctgatgatcagcagaacccctgaggtgacctgcgtggtggtggacgtgagccaagaggaccctgaggtgcagttcaactggtacgtggacggcgtggaggtgcacaacgccaagaccaagcctagagaggagcagttcaacagcacctacagagtggtgagcgtgctgaccgtgctgcaccaagactggctgaacggcaaggagtacaagtgcaaggtgagcaacaagggcctgcctagcagtattgaaaagaccatcagcaaggccaagggacagcctagagagcctcaagtgtacaccctgcctcctagccaagaggagatgaccaagaaccaagtgagcctgacctgcctggtgaaggggttttaccctagcgacatcgccgtggagtgggagagcaacggacagcctgagaacaactacaagaccacccctcctgtgctggacagcgacggcagcttcttcctgtacagcagactgaccgtggacaagagcagatggcaagagggcaacgtgttcagctgcagcgtgatgcacgaggccctgcacaaccactacacacagaagagcctgagcctgagcctgggcaag

SEQ ID NO: 192 - DNA, 336 bp, synthetic construct
  source 1..336: mol_type = other DNA
gacgtggtgatgacacagacccctctgagcctgcctgtgagcctgggcgaccaagctagcatcagctgcagaagctctcagagcctggtgcacaacaacggcatcacctacctgtactggtacctgcagaagcctggacagagccctaagctgctgatctacagagtgagcaacagattcagcggcgtgcctgacagattcggcggcagcggcagcggcaccgacttcaccctgaagatcagcagagtggaggccgaggacctgggcgtgtacttctgcttccaaggcacgcatgtacctagaaccttcggcggcggcaccaagctggagatcaag

SEQ ID NO: 193 - DNA, 657 bp, synthetic construct
  source 1..657: mol_type = other DNA
gacgtggtgatgacacagacccctctgagcctgcctgtgagcctgggcgaccaagctagcatcagctgcagaagctctcagagcctggtgcacaacaacggcatcacctacctgtactggtacctgcagaagcctggacagagccctaagctgctgatctacagagtgagcaacagattcagcggcgtgcctgacagattcggcggcagcggcagcggcaccgacttcaccctgaagatcagcagagtggaggccgaggacctgggcgtgtacttctgcttccaaggcacgcatgtacctagaaccttcggcggcggcaccaagctggagatcaagagaaccgtggccgcccctagcgtgttcatcttccctcctagcgacgagcagctgaagagcggcaccgctagcgtggtgtgcctgctgaacaacttctaccctagagaggccaaggtgcagtggaaggtggacaacgccctgcagagcggcaacagccaagagagcgtgaccgagcaagacagcaaggacagcacctacagcctgagcagcaccctgaccctgagcaaggccgactacgagaagcacaaggtgtacgcctgcgaggtgacccaccaaggcctgagcagccctgtgaccaagagcttcaacagaggcgagtgc

SEQ ID NO: 194 - DNA, 57 bp, synthetic construct
  source 1..57: mol_type = other DNA
atgagtcctgcccagttcctgtttctgttagtgctctggattcgggaaaccaacggt

SEQ ID NO: 195 - DNA, 72 bp, synthetic construct
  source 1..72: mol_type = other DNA
gccgccaccatgagtcctgcccagttcctgtttctgttagtgctctggattcgggaaaccaacggtgctgcc

SEQ ID NO: 196 - DNA, 321 bp, synthetic construct
  source 1..321: mol_type = other DNA
cgggctgatgctgcaccaactgtatccatcttcccaccatccagtgagcagttaacatctggaggtgcctcagtcgtgtgcttcttgaacaacttctaccccaaagacatcaatgtcaagtggaagattgatggcagtgaacgacaaaatggcgtcctgaacagttggactgatcaggacagcaaagacagcacctacagcatgagcagcaccctcacgttgaccaaggacgagtatgaacgacataacagctatacctgtgaggccactcacaagacatcaacttcacccattgtcaagagcttcaacaggaatgagtgt

SEQ ID NO: 197 - protein, 16 aa, synthetic construct
RSSQTIVHSNGNTYLE

SEQ ID NO: 198 - protein, 9 aa, synthetic construct
FQGSHVPFT

SEQ ID NO: 199 - protein, 11 aa, synthetic construct
KASQDINKYIA

SEQ ID NO: 200 - protein, 14 aa, synthetic construct
GSGSPHSKAQNQQT

SEQ ID NO: 201 - protein, 14 aa, synthetic construct
GHDSPHKSGQNQQT

SEQ ID NO: 202 - protein, 14 aa, synthetic construct
GSGSPHARMQNQQT

SEQ ID NO: 203 - protein, 14 aa, synthetic construct
GSGSPHVKSQNQQT

SEQ ID NO: 204 - protein, 14 aa, synthetic construct
GQDSPHKSGQNQQT

SEQ ID NO: 205 - protein, 14 aa, synthetic construct
GSGSPHASRQNQQT

SEQ ID NO: 206 - protein, 14 aa, synthetic construct
GSGSPHASRQNKQT

SEQ ID NO: 207 - protein, 14 aa, synthetic construct
GSGSPHVKIQNQQT

SEQ ID NO: 208 - protein, 14 aa, synthetic construct
GSGSPHSKAKNQQT

SEQ ID NO: 209 - protein, 14 aa, synthetic construct
GSGSPHKKNQNQQT

SEQ ID NO: 210 - protein, 14 aa, synthetic construct
GSGSPHVRMQNQQT

SEQ ID NO: 211 - protein, 14 aa, synthetic construct
GSGSPHASRQKQQT

SEQ ID NO: 212 - protein, 14 aa, synthetic construct
GHSSPHRSGQNQQT

SEQ ID NO: 213 - protein, 14 aa, synthetic construct
GMRTYHLSGQNQQT

SEQ ID NO: 214 - protein, 14 aa, synthetic construct
GSGSPHTRGQNQQT

SEQ ID NO: 215 - protein, 14 aa, synthetic construct
GSGIIPVSSQNQQT

SEQ ID NO: 216 - protein, 14 aa, synthetic construct
GSEYGHKSGQNQQT

SEQ ID NO: 217 - protein, 14 aa, synthetic construct
GRGQNVSSVHRQQT

SEQ ID NO: 218 - protein, 14 aa, synthetic construct
GSSHRFYGGQNQQT

SEQ ID NO: 219 - protein, 14 aa, synthetic construct
GYFVAAWSGQNQQT

SEQ ID NO: 220 - protein, 14 aa, synthetic construct
GSVLHSHAAQNQQT

SEQ ID NO: 221 - protein, 14 aa, synthetic construct
GSGDLVVSTQNQQT

SEQ ID NO: 222 - protein, 14 aa, synthetic construct
GSYGMAASGQNQQT

SEQ ID NO: 223 - protein, 14 aa, synthetic construct
GLNHFGASGQNQQT

SEQ ID NO: 224 - protein, 14 aa, synthetic construct
GSTGSHSAGQNQHT

SEQ ID NO: 225 - protein, 14 aa, synthetic construct
GLAGHTVSGQNQQT

SEQ ID NO: 226 - protein, 14 aa, synthetic construct
GIILGASSGQNQQT

SEQ ID NO: 227 - protein, 14 aa, synthetic construct
GSGVSTYNIQNQQT

SEQ ID NO: 228 - protein, 14 aa, synthetic construct
GSLVSVQTGQNQQT

SEQ ID NO: 229 - protein, 14 aa, synthetic construct
GQSSPHRSGQNQQT

SEQ ID NO: 230 - protein, 14 aa, synthetic construct
GREYGHKSGQNQQT

SEQ ID NO: 231 - protein, 14 aa, synthetic construct
GHTLTLSSGQNQQT

SEQ ID NO: 232 - protein, 14 aa, synthetic construct
GSITLIPSGQNQQT

SEQ ID NO: 233 - protein, 14 aa, synthetic construct
GSNGFTALGQNQQT

SEQ ID NO: 234 - protein, 14 aa, synthetic construct
GSGHSSHSVQNQQT

SEQ ID NO: 235 - protein, 14 aa, synthetic construct
GSGIPQRSGKNQQT

SEQ ID NO: 236 - protein, 14 aa, synthetic construct
GSGDTLHMLQNQQT

SEQ ID NO: 237 - protein, 14 aa, synthetic construct
GERHTVLSGQNQQT

SEQ ID NO: 238 - protein, 14 aa, synthetic construct
GSGMPQSHIQNQQT

SEQ ID NO: 239 - protein, 14 aa, synthetic construct
GSGQLSGIGGNQQT

SEQ ID NO: 240 - protein, 14 aa, synthetic construct
GSGQNRKPASFAQT

SEQ ID NO: 241 - protein, 14 aa, synthetic construct
GSGSVSQLGQNQQT

SEQ ID NO: 242 - protein, 14 aa, synthetic construct
GSDFLGTHGQNQQT

SEQ ID NO: 243 - protein, 14 aa, synthetic construct
GQIVQNPSGQNQQT

SEQ ID NO: 244 - protein, 14 aa, synthetic construct
GSGTQIPSQQNQQT

SEQ ID NO: 245 - protein, 14 aa, synthetic construct
GSGQNQQSAREGLT

SEQ ID NO: 246 - protein, 14 aa, synthetic construct
GSGLGMSTGQNQQT

SEQ ID NO: 247 - protein, 14 aa, synthetic construct
GSGLPVLSGQNQQT

SEQ ID NO: 248 - protein, 14 aa, synthetic construct
GSGHSIRTDQNQQT

SEQ ID NO: 249 - protein, 14 aa, synthetic construct
GSGQSVQTVVNQQT

SEQ ID NO: 250 - protein, 14 aa, synthetic construct
GSGQNRAQSRFQQT

SEQ ID NO: 251 - protein, 14 aa, synthetic construct
GGGDLGRSSQNQQT

SEQ ID NO: 252 - protein, 14 aa, synthetic construct
GGGTKMDSGQNQQT

SEQ ID NO: 253 - protein, 14 aa, synthetic construct
GSGSPHPSRQNQQT

SEQ ID NO: 254 - protein, 14 aa, synthetic construct
GSGQFTNAGMNQQT

SEQ ID NO: 255 - protein, 14 aa, synthetic construct
GGRNGHTVGQNQQT

SEQ ID NO: 256 - protein, 14 aa, synthetic construct
GSGFGPQTGQNQQT

SEQ ID NO: 257 - protein, 14 aa, synthetic construct
GRTDSHTSGQNQQT

SEQ ID NO: 258 - protein, 14 aa, synthetic construct
GYEVLGSSGQNQQT

SEQ ID NO: 259 - protein, 14 aa, synthetic construct
GSVHLSVTGQNQQT

SEQ ID NO: 260 - protein, 14 aa, synthetic construct
GFMSYKGSGQNQQT

SEQ ID NO: 261 - protein, 14 aa, synthetic construct
GNIAGSVSGQNQQT

SEQ ID NO: 262 - protein, 14 aa, synthetic construct
GSGSHRDVSQNQQT

SEQ ID NO: 263 - protein, 14 aa, synthetic construct
GGLGSMSSGQNQQT

SEQ ID NO: 264 - protein, 14 aa, synthetic construct
GSGHLPQSAQNQQT

SEQ ID NO: 265 - protein, 14 aa, synthetic construct
GGVLVGGSGQNQQT

SEQ ID NO: 266 - protein, 14 aa, synthetic construct
GTHPYTSSGQNQQT

SEQ ID NO: 267 - protein, 14 aa, synthetic construct
GSGQNQQLKENRST

SEQ ID NO: 268 - protein, 14 aa, synthetic construct
GSGQNQQTSPHNHT

SEQ ID NO: 269 - protein, 14 aa, synthetic construct
GSGTLYPQSQNQQT

SEQ ID NO: 270 - protein, 14 aa, synthetic construct
GSGQNQQSNWITKT

SEQ ID NO: 271 - protein, 14 aa, synthetic construct
GSGYTSLFLQNQQT

SEQ ID NO: 272 - protein, 14 aa, synthetic construct
GSGVMTHVLQNQQT

SEQ ID NO: 273 - protein, 14 aa, synthetic construct
GSVSDVRAGQNQQT

SEQ ID NO: 274 - protein, 14 aa, synthetic construct
GSGQSHMATLNQQT

SEQ ID NO: 275 - protein, 14 aa, synthetic construct
GSGLSVHLAQNQQT

SEQ ID NO: 276 - protein, 14 aa, synthetic construct
GSGLSHATQQNQQT

SEQ ID NO: 277 - protein, 14 aa, synthetic construct
GSGLSVQSGQNQQT

SEQ ID NO: 278 - protein, 14 aa, synthetic construct
GSGHMTYREKNQQT

SEQ ID NO: 279 - protein, 14 aa, synthetic construct
GSKGVPTPGQNQQT

SEQ ID NO: 280 - protein, 14 aa, synthetic construct
GSGLLPLSSQNQQT

SEQ ID NO: 281 - protein, 14 aa, synthetic construct
GNGLYAVSGQNQQT

SEQ ID NO: 282 - protein, 14 aa, synthetic construct
GFNGSPSSGQNQQT

SEQ ID NO: 283 - protein, 14 aa, synthetic construct
GSGQIRHSDQNQQT

SEQ ID NO: 284 - protein, 14 aa, synthetic construct
GGQVAPSSGQNQQT

SEQ ID NO: 285 - protein, 14 aa, synthetic construct
GSFSMHTHGQNQQT

SEQ ID NO: 286 - protein, 14 aa, synthetic construct
GSGQNQQVIQGSNT

SEQ ID NO: 287 - protein, 14 aa, synthetic construct
GRVLHSHAGQNQQT

SEQ ID NO: 288 - protein, 14 aa, synthetic construct
GSGQNQQTSLQDQT

SEQ ID NO: 289 - protein, 14 aa, synthetic construct
GSGLGRAPVQNQQT

SEQ ID NO: 290 - protein, 14 aa, synthetic construct
GNGFSSASGQNQQT

SEQ ID NO: 291 - protein, 14 aa, synthetic construct
GSGQMASRESNQQT

SEQ ID NO: 292 - protein, 14 aa, synthetic construct
GPGLPNHSGQNQQT

SEQ ID NO: 293 - protein, 14 aa, synthetic construct
GNIQWQGSGQNQQT

SEQ ID NO: 294 - protein, 14 aa, synthetic construct
GMSAHMSSGQNQQT

SEQ ID NO: 295 - protein, 14 aa, synthetic construct
GHSFVNRSGQNQQT

SEQ ID NO: 296 - protein, 14 aa, synthetic construct
GRAVMDHSGQNQQT

SEQ ID NO: 297 - protein, 14 aa, synthetic construct
GALTVMQSGQNQQT

SEQ ID NO: 298 - protein, 14 aa, synthetic construct
GSGQRSPVLPNQQT

SEQ ID NO: 299 - protein, 14 aa, synthetic construct
GSGQNGHLSLKQQT

SEQ ID NO: 300 - protein, 14 aa, synthetic construct
GSLPRGTSDQNQQT

SEQ ID NO: 301 - protein, 14 aa, synthetic construct
GVAGSLVSGQNQQT

SEQ ID NO: 302 - protein, 14 aa, synthetic construct
GRGGIPQSGQNQQT

SEQ ID NO: 303 - protein, 14 aa, synthetic construct
GSGQYASSIPNQQT

SEQ ID NO: 304 - protein, 14 aa, synthetic construct
GTDFGRQSSQNQQT

SEQ ID NO: 305 - protein, 14 aa, synthetic construct
GIFMQTPSGQNQQT

SEQ ID NO: 306 - protein, 14 aa, synthetic construct
GSGQNQQTRLVDLT

SEQ ID NO: 307 - protein, 14 aa, synthetic construct
GTREMPLSGQNQQT

SEQ ID NO: 308 - protein, 14 aa, synthetic construct
GSRLVHVHGQNQQT

SEQ ID NO: 309 - protein, 14 aa, synthetic construct
GSGRLVPNGPNQQT

SEQ ID NO: 310 - protein, 14 aa, synthetic construct
GSGYLRESPQNQQT

SEQ ID NO: 311 - protein, 14 aa, synthetic construct
GARIQNASGQKQQT

SEQ ID NO: 312 - protein, 14 aa, synthetic construct
GLSNPMPSGQNQQT

SEQ ID NO: 313 - protein, 14 aa, synthetic construct
GSTVQDTRGQNQQT

SEQ ID NO: 314 - protein, 14 aa, synthetic construct
GPFGMPSSGQNQQT

SEQ ID NO: 315 - protein, 14 aa, synthetic construct
GSGQNHGVLSNQQT

SEQ ID NO: 316 - protein, 14 aa, synthetic construct
GSGYSMSQAQNQQT

SEQ ID NO: 317 - protein, 14 aa, synthetic construct
GSGMLTHTLQNQQT

SEQ ID NO: 318 - protein, 14 aa, synthetic construct
GRGSPHASRQNQQT

SEQ ID NO: 319 - protein, 14 aa, synthetic construct
GLSWPSTSGQNQQT

SEQ ID NO: 320 - protein, 14 aa, synthetic construct
GNSMERTSGQNQQT

SEQ ID NO: 321 - protein, 14 aa, synthetic construct
GSGMSPSTLQNQQT

SEQ ID NO: 322 - protein, 14 aa, synthetic construct
GSGHGQVLSQNQQT

SEQ ID NO: 323 - protein, 14 aa, synthetic construct
GRGQIYSTGGNQQT

SEQ ID NO: 324 - protein, 14 aa, synthetic construct
GVVAAHNSGQNQQT

SEQ ID NO: 325 - protein, 14 aa, synthetic construct
GDSSLRHSGQNQQT

SEQ ID NO: 326 - protein, 14 aa, synthetic construct
GSLVSQGAGQNQQT

SEQ ID NO: 327 - protein, 14 aa, synthetic construct
GSLLQAHSGQNQQT

SEQ ID NO: 328 - protein, 14 aa, synthetic construct
GSGHIYVGIQNQQT

SEQ ID NO: 329 - protein, 14 aa, synthetic construct
GHHTTVQSGQNQQT

SEQ ID NO: 330 - protein, 14 aa, synthetic construct
GSRQSKRNELNQQT

SEQ ID NO: 331 - protein, 14 aa, synthetic construct
GSGQNQQHVSSPRT

SEQ ID NO: 332 - protein, 14 aa, synthetic construct
GSSKELLWGQNQQT

SEQ ID NO: 333 - protein, 14 aa, synthetic construct
GSLSTPSSGQNQQT

SEQ ID NO: 334 - protein, 14 aa, synthetic construct
GSIGYAGQGQNQQT

SEQ ID NO: 335 - protein, 14 aa, synthetic construct
GSGQNQRVSNSQQT

SEQ ID NO: 336 - protein, 14 aa, synthetic construct
GSGYASHVQQNQQT

SEQ ID NO: 337 - protein, 14 aa, synthetic construct
GSGEYSRSGQNQQT

SEQ ID NO: 338 - protein, 14 aa, synthetic construct
GSVSTHSSGQNQQT

SEQ ID NO: 339 - protein, 14 aa, synthetic construct
GSGQNQHSLGNYQT

SEQ ID NO: 340 - protein, 14 aa, synthetic construct
GSGGLDTRGQNQQT

SEQ ID NO: 341 - protein, 14 aa, synthetic construct
GNILHATSGQNQQT

SEQ ID NO: 342 - protein, 14 aa, synthetic construct
GSGQSYTMTQNQQT

SEQ ID NO: 343 - protein, 14 aa, synthetic construct
GSGQNQHSAPNSQT

SEQ ID NO: 344 - protein, 14 aa, synthetic construct
GSGQNQQTMDHNRT

SEQ ID NO: 345 - protein, 14 aa, synthetic construct
GSNGGVGTGQNQQT

SEQ ID NO: 346 - protein, 14 aa, synthetic construct
GAGSIIPSGQNQQT

SEQ ID NO: 347 - protein, 14 aa, synthetic construct
GSGQTHGGQHNQQT

SEQ ID NO: 348 - protein, 14 aa, synthetic construct
GSNLSFQSGQNQQT

SEQ ID NO: 349 - protein, 14 aa, synthetic construct
GATLQVHSGQNQQT

SEQ ID NO: 350 - protein, 14 aa, synthetic construct
GSGFNQRSEQNQQT

SEQ ID NO: 351 - protein, 14 aa, synthetic construct
GSGSLRDFDQNQQT

SEQ ID NO: 352 - protein, 14 aa, synthetic construct
GSGDSITGKQNQQT

SEQ ID NO: 353 - protein, 14 aa, synthetic construct
GSGQDRNIVQNQQT

SEQ ID NO: 354 - protein, 14 aa, synthetic construct
GSGLSHSHQQNQQT

SEQ ID NO: 355 - protein, 14 aa, synthetic construct
GSGQNQQTGMSSVK

SEQ ID NO: 356 - protein, 14 aa, synthetic construct
GSVTHGISGQNQQT

SEQ ID NO: 357 - protein, 14 aa, synthetic construct
GVVAHQPSGQNQQT

SEQ ID NO: 358 - protein, 14 aa, synthetic construct
GSGPILGQLQNQQT

SEQ ID NO: 359 - protein, 14 aa, synthetic construct
GSGHVPNSGLNQQT

SEQ ID NO: 360 - protein, 14 aa, synthetic construct
GDAGVRSSGQNQQT

SEQ ID NO: 361 - protein, 14 aa, synthetic construct
GSGSQLMSLQNQQT

SEQ ID NO: 362 - protein, 14 aa, synthetic construct
GSGLDYSQRQNQQT

SEQ ID NO: 363 - protein, 14 aa, synthetic construct
GSGQSSGRLINKQT

SEQ ID NO: 364 - protein, 14 aa, synthetic construct
GSSVSPSSGQNQQT

SEQ ID NO: 365 - protein, 14 aa, synthetic construct
GSGQVVGLSGNQQT

SEQ ID NO: 366 - protein, 14 aa, synthetic construct
GSNMGVPLGQNQQT

SEQ ID NO: 367 - protein, 14 aa, synthetic construct
GSFYPSSTGQNQQT

SEQ ID NO: 368 - protein, 14 aa, synthetic construct
GSGQNQQTRLTDLT

SEQ ID NO: 369 - protein, 14 aa, synthetic construct
GPTNGRSSGQNQQT

SEQ ID NO: 370 - protein, 14 aa, synthetic construct
GSGLLHGKLQNQQT

SEQ ID NO: 371 - protein, 14 aa, synthetic construct
GANMGHVSGQNQQT

SEQ ID NO: 372 - protein, 14 aa, synthetic construct
GSGQNQQSGRGDLT

SEQ ID NO: 373 - protein, 14 aa, synthetic construct
GSHGHYASGQKQQT

SEQ ID NO: 374 - protein, 14 aa, synthetic construct
GSGDLRISPQNQQT

SEQ ID NO: 375 - protein, 14 aa, synthetic construct
GSGMPVILGQNQQT

SEQ ID NO: 376 - protein, 14 aa, synthetic construct
GRGVITSSGQNHQT

SEQ ID NO: 377 - protein, 14 aa, synthetic construct
GSGHSVSGPQNQQT

SEQ ID NO: 378 - protein, 14 aa, synthetic construct
GSRNGHTVGRNQQT

SEQ ID NO: 379 - protein, 14 aa, synthetic construct
GAGVHMVSGQNQQT

SEQ ID NO: 380 - protein, 14 aa, synthetic construct
GSGQNHRPSVLQQT

SEQ ID NO: 381 - protein, 14 aa, synthetic construct
GSGSPRDSIQNQQT

SEQ ID NO: 382 - protein, 14 aa, synthetic construct
GSGQGIHSSVNQQT

SEQ ID NO: 383 - protein, 14 aa, synthetic construct
GSGQQLSITPNQQT

SEQ ID NO: 384 - protein, 14 aa, synthetic construct
GGYHSQTSGQNQQT

SEQ ID NO: 385 - protein, 14 aa, synthetic construct
GSLHHDNHGQNQQT

SEQ ID NO: 386 - protein, 14 aa, synthetic construct
GIMARDSSGQNQQT

SEQ ID NO: 387 - protein, 14 aa, synthetic construct
GVVHITNSGQNQQT

SEQ ID NO: 388 - protein, 14 aa, synthetic construct
GSGQNQHSAPFNQT

SEQ ID NO: 389 - protein, 14 aa, synthetic construct
GSGQTSGLKQNQQT

SEQ ID NO: 390 - protein, 14 aa, synthetic construct
GSGQNQQTSLSNTA

SEQ ID NO: 391 - protein, 14 aa, synthetic construct
GSGQNQAVHNKSQT

SEQ ID NO: 392 - protein, 14 aa, synthetic construct
GVHTHLPSGQNQQT

SEQ ID NO: 393 - protein, 14 aa, synthetic construct
GHLTMHNSGQNHQT

SEQ ID NO: 394 - protein, 14 aa, synthetic construct
GSGSSSRPYQNQQT

SEQ ID NO: 395 - protein, 14 aa, synthetic construct
GILLATPSGQNQQT

SEQ ID NO: 396 - protein, 14 aa, synthetic construct
GSGQNAGSFPNQQT

SEQ ID NO: 397 - protein, 14 aa, synthetic construct
GSRDGHTVGQNQQT

SEQ ID NO: 398 - protein, 14 aa, synthetic construct
GSLLISTSGQNQQT

SEQ ID NO: 399 - protein, 14 aa, synthetic construct
GSGAMPSHGQNQQT

SEQ ID NO: 400 - protein, 14 aa, synthetic construct
GALVSPISGQNQQT

SEQ ID NO: 401 - protein, 14 aa, synthetic construct
GSLSSHGVGQNQQT

SEQ ID NO: 402 - protein, 14 aa, synthetic construct
GSGQNQQASLAMRT

SEQ ID NO: 403 - protein, 14 aa, synthetic construct
GPGLGSHSGQNQQT

SEQ ID NO: 404 - protein, 14 aa, synthetic construct
GHDSQHKSGQNQQT

SEQ ID NO: 405 - protein, 14 aa, synthetic construct
GSGLTLSATQNQQT

SEQ ID NO: 406 - protein, 14 aa, synthetic construct
GSGQVVAHVGNQQT

SEQ ID NO: 407 - protein, 14 aa, synthetic construct
GSGLRTMTTQNQQT

SEQ ID NO: 408 - protein, 14 aa, synthetic construct
GSGQVGRLLQNQQT

SEQ ID NO: 409 - protein, 14 aa, synthetic construct
GSGQLSHQSVNQQT

SEQ ID NO: 410 - protein, 14 aa, synthetic construct
GSGDRYQTLQNQQT

SEQ ID NO: 411 - protein, 14 aa, synthetic construct
GSGQNQQLKSSAQT

SEQ ID NO: 412 - protein, 14 aa, synthetic construct
GSGQNQYSIPVAQT

SEQ ID NO: 413 - protein, 14 aa, synthetic construct
GSGERLHLTQNQQT

SEQ ID NO: 414 - protein, 14 aa, synthetic construct
GSGHNQQVRTAPNT

SEQ ID NO: 415 - protein, 14 aa, synthetic construct
GGLSHVMSGQNQQT

SEQ ID NO: 416 - protein, 14 aa, synthetic construct
GSGQSHRDVLNQQT

SEQ ID NO: 417 - protein, 14 aa, synthetic construct
GSGQNLAGRMDQQT

SEQ ID NO: 418 - protein, 14 aa, synthetic construct
GSGQNQQTNRGNPM

SEQ ID NO: 419 - protein, 14 aa, synthetic construct
GSGQSYQRDHNQQT

SEQ ID NO: 420 - protein, 14 aa, synthetic construct
GSLLSAGMGQNQHT

SEQ ID NO: 421 - protein, 14 aa, synthetic construct
GSGQNQQTAIYRNI

SEQ ID NO: 422 - protein, 14 aa, synthetic construct
GSGQNQQTSGTTNC

SEQ ID NO: 423 - protein, 14 aa, synthetic construct
GMTSHSVSGQNQQT

SEQ ID NO: 424 - protein, 14 aa, synthetic construct
GSSQSTGYQPNQQT

SEQ ID NO: 425 - protein, 14 aa, synthetic construct
GSLKPTTLGQNQQT

SEQ ID NO: 426 - protein, 14 aa, synthetic construct
GRMFSLGSGQNQQT

SEQ ID NO: 427 - protein, 14 aa, synthetic construct
GSGQNQQTALGVKC

SEQ ID NO: 428 - protein, 14 aa, synthetic construct
GAMVSHSSGQNQQT

SEQ ID NO: 429 - protein, 14 aa, synthetic construct
GSGQNQQRNSDSVT

SEQ ID NO: 430 - protein, 14 aa, synthetic construct
GSGQSMTLHLNQQT

SEQ ID NO: 431 - protein, 14 aa, synthetic construct
GSGQVHQAEVNQQT

SEQ ID NO: 432 - protein, 14 aa, synthetic construct
GSGQNQSQNHLQQT

SEQ ID NO: 433 - protein, 14 aa, synthetic construct
GSLLTTASGQNQQT

SEQ ID NO: 434 - protein, 14 aa, synthetic construct
GSGLIRTAAQNQQT

SEQ ID NO: 435 - protein, 14 aa, synthetic construct
GSGQNQQTVSRQST

SEQ ID NO: 436 - protein, 14 aa, synthetic construct
GSGQYANHGINQQT

SEQ ID NO: 437 - protein, 14 aa, synthetic construct
GSRSTGPSGQNQQT

SEQ ID NO: 438 - protein, 14 aa, synthetic construct
GRGVQQKLQQNQQT

SEQ ID NO: 439 - protein, 14 aa, synthetic construct
GSGQNQQVHLSTGT

SEQ ID NO: 440 - protein, 14 aa, synthetic construct
GSGQNQQLSAKSST

SEQ ID NO: 441 - protein, 14 aa, synthetic construct
GSGYKAARPQNQQT

SEQ ID NO: 442 - protein, 14 aa, synthetic construct
GSAGISPSGQNQQT

SEQ ID NO: 443 - protein, 14 aa, synthetic construct
GSGQNRAHAFLQQT

SEQ ID NO: 444 - protein, 14 aa, synthetic construct
GSGLSGITMQNQQT

SEQ ID NO: 445 - protein, 14 aa, synthetic construct
GPGSAHSSGQNQQT

SEQ ID NO: 446 - protein, 14 aa, synthetic construct
GSSHTQALGQNQQT

SEQ ID NO: 447 - protein, 14 aa, synthetic construct
GSGVHGVSSQNQQT

SEQ ID NO: 448 - protein, 14 aa, synthetic construct
GSSGRDMGGQNQQT

SEQ ID NO: 449 - protein, 14 aa, synthetic construct
GERAFPTSGQNQQT

SEQ ID NO: 450 - protein, 14 aa, synthetic construct
GGRIVSLSGQNQQT

SEQ ID NO: 451 - protein, 14 aa, synthetic construct
GSGQNSYSHTSQQT

SEQ ID NO: 452 - protein, 14 aa, synthetic construct
GLGYPGSSGQNQQT

SEQ ID NO: 453 - protein, 14 aa, synthetic construct
GSGPQSHTGQNQQT

SEQ ID NO: 454 - protein, 14 aa, synthetic construct
GSGQNQQLSRDAST

SEQ ID NO: 455 - protein, 14 aa, synthetic construct
GSGQILHSVPNQQT

SEQ ID NO: 456 - protein, 14 aa, synthetic construct
GSGFHTDSRQNQQT

SEQ ID NO: 457 - protein, 14 aa, synthetic construct
GSGQSHSLATNQQT

SEQ ID NO: 458 - protein, 14 aa, synthetic construct
GSGQNQQTLSKPWT

SEQ ID NO: 459 - protein, 14 aa, synthetic construct
GSGHAAISQQNQQT

SEQ ID NO: 460 - protein, 14 aa, synthetic construct
GSGQNQQQIGGNST

SEQ ID NO: 461 - protein, 14 aa, synthetic construct
GGGPMAGSGQNQQT

SEQ ID NO: 462 - protein, 14 aa, synthetic construct
GMRMEYQSGQNQQT

SEQ ID NO: 463 - protein, 14 aa, synthetic construct
GSGQNQQGTLLHQT

SEQ ID NO: 464 - protein, 14 aa, synthetic construct
GSGQNQRSSGGVQT

SEQ ID NO: 465 - protein, 14 aa, synthetic construct
GSGQNQRGALATQT

SEQ ID NO: 466 - protein, 14 aa, synthetic construct
GSGTVHAATQNQQT

SEQ ID NO: 467 - protein, 14 aa, synthetic construct
GSRMTQQFGQNQQT

SEQ ID NO: 468 - protein, 14 aa, synthetic construct
GSSSPGASGQNQQT

SEQ ID NO: 469 - protein, 14 aa, synthetic construct
GHPSPHVSGQNQQT

SEQ ID NO: 470 - protein, 14 aa, synthetic construct
GSGSHHASRQNQQT

SEQ ID NO: 471 - protein, 14 aa, synthetic construct
GAVGHSYSGQNQQT

SEQ ID NO: 472 - protein, 14 aa, synthetic construct
GSRSQYDIGQNQQT

SEQ ID NO: 473 - protein, 14 aa, synthetic construct
GSGQGPQERGNQQT

SEQ ID NO: 474 - protein, 14 aa, synthetic construct
GSIAHVGTGQNQQT

SEQ ID NO: 475 - protein, 14 aa, synthetic construct
GSGQNQQKQNHGNT

SEQ ID NO: 476 - protein, 14 aa, synthetic construct
GSGQNQQALGSQRT

SEQ ID NO: 477 - protein, 14 aa, synthetic construct
GSGAITHMPQNQQT

SEQ ID NO: 478 - protein, 14 aa, synthetic construct
GSGQRNPLLLNQQT

SEQ ID NO: 479 - protein, 14 aa, synthetic construct
GSSGIPVSHQNQQT

SEQ ID NO: 480 - protein, 14 aa, synthetic construct
GVHSLTPSGQNQQT

SEQ ID NO: 481 - protein, 14 aa, synthetic construct
GVIVLHGSGQNQQT

SEQ ID NO: 482 - protein, 14 aa, synthetic construct
GGTRVVDSGQNQQT

SEQ ID NO: 483 - protein, 14 aa, synthetic construct
GSGGVTYQSQNQQT

SEQ ID NO: 484 - protein, 14 aa, synthetic construct
GSGQNQAGHGPGQT

SEQ ID NO: 485 - protein, 14 aa, synthetic construct
GSGQLVTSGPNQQT

SEQ ID NO: 486 - protein, 14 aa, synthetic construct
GSGIAAQRTQNQQT

SEQ ID NO: 487 - protein, 14 aa, synthetic construct
GSTPAGVGGQNQQT

SEQ ID NO: 488 - protein, 14 aa, synthetic construct
GSGQNQQTSTGVHS

SEQ ID NO: 489 - protein, 14 aa, synthetic construct
GSGQIRQLVDNQQT

SEQ ID NO: 490 - protein, 14 aa, synthetic construct
GSLIGMQSGQNQQT

SEQ ID NO: 491 - protein, 14 aa, synthetic construct
GSGQIKGKMDNQQT

SEQ ID NO: 492 - protein, 14 aa, synthetic construct
GSGSDMSSWQNQQT

SEQ ID NO: 493 - protein, 14 aa, synthetic construct
GRGQNQQHTGLATT

SEQ ID NO: 494 - protein, 14 aa, synthetic construct
GSGQNQQTLYSSNT

SEQ ID NO: 495 - protein, 14 aa, synthetic construct
GSGQTQVLKSNQQT

SEQ ID NO: 496 - protein, 14 aa, synthetic construct
GSRTLSNVGQNQQT

SEQ ID NO: 497 - protein, 14 aa, synthetic construct
GSGVQHSLPQNQQT

SEQ ID NO: 498 - protein, 14 aa, synthetic construct
GNYLHQASGQNQQT

SEQ ID NO: 499 - protein, 14 aa, synthetic construct
GSGGTSVHQQNQQT

SEQ ID NO: 500 - protein, 14 aa, synthetic construct
GMDHSRPSGQNQQT

SEQ ID NO: 501 - protein, 14 aa, synthetic construct
GSGQNQQSMGTFTT

SEQ ID NO: 502 - protein, 14 aa, synthetic construct
GSGQNQQTPLRPPT

SEQ ID NO: 503 - protein, 14 aa, synthetic construct
GSGQNQHHSVSQQT

SEQ ID NO: 504 - protein, 14 aa, synthetic construct
GSGQLRSLSTNQQT

SEQ ID NO: 505 - protein, 14 aa, synthetic construct
GSGSPRQLSQNQQT

SEQ ID NO: 506 - protein, 14 aa, synthetic construct
GSGQNQQTTASSHT

SEQ ID NO: 507 - protein, 14 aa, synthetic construct
GRGQVVSTHQNQQT

SEQ ID NO: 508 - protein, 14 aa, synthetic construct
GSAQVSMVGQNQQT

SEQ ID NO: 509 - protein, 14 aa, synthetic construct
GSSTLVTIGKNQQT

SEQ ID NO: 510 - protein, 14 aa, synthetic construct
GFAHQASSGQNQQT

SEQ ID NO: 511 - protein, 14 aa, synthetic construct
GSGQPVLSISNQQT

SEQ ID NO: 512 - protein, 14 aa, synthetic construct
GSGQSHRSELNQQT

SEQ ID NO: 513 - protein, 14 aa, synthetic construct
GSSVGSPIGQNQQT

SEQ ID NO: 514 - protein, 14 aa, synthetic construct
GSGMPIRNVQNQQT

SEQ ID NO: 515 - protein, 14 aa, synthetic construct
GSSTRVDSGQNQQT

SEQ ID NO: 516 - protein, 14 aa, synthetic construct
GSGQNQQTAMRSTT

SEQ ID NO: 517 - protein, 14 aa, synthetic construct
GSGQNQQHSSSHLT

SEQ ID NO: 518 - protein, 14 aa, synthetic construct
GSRNGHAVGQNQQT

SEQ ID NO: 519 - protein, 14 aa, synthetic construct
GLGAYQSSGQNQQT

SEQ ID NO: 520 - protein, 14 aa, synthetic construct
GPGLSGHSGQNQQT

SEQ ID NO: 521 - protein, 14 aa, synthetic construct
GSTGIVSSGQNQQT

SEQ ID NO: 522 - protein, 14 aa, synthetic construct
GSRTTQVIGQNQQT

SEQ ID NO: 523 - protein, 14 aa, synthetic construct
GSGLLHRAQQNQQT

SEQ ID NO: 524 - protein, 14 aa, synthetic construct
GSGQNAQQAAAQQT

SEQ ID NO: 525 - protein, 14 aa, synthetic construct
GSGQNQQSALRTQT

SEQ ID NO: 526 - protein, 14 aa, synthetic construct
GSGFLSDTRQNQQT

SEQ ID NO: 527 - protein, 14 aa, synthetic construct
GSGLLYHDQQNQQT

SEQ ID NO: 528 - protein, 14 aa, synthetic construct
GSGQNQHYSLHKQT

SEQ ID NO: 529 - protein, 14 aa, synthetic construct
GSGHSPLPQQNQQT

SEQ ID NO: 530 - protein, 14 aa, synthetic construct
GNGHSMRPNQNQQT

SEQ ID NO: 531 - protein, 14 aa, synthetic construct
GSGLKWSTLQNQQT

SEQ ID NO: 532 - protein, 14 aa, synthetic construct
GSGQMGRQAVNQQT

SEQ ID NO: 533 - protein, 14 aa, synthetic construct
GSGQNQQTSGVLTL

SEQ ID NO: 534 - protein, 14 aa, synthetic construct
GSGQNQQALHNPHT

SEQ ID NO: 535 - protein, 14 aa, synthetic construct
GSGQNQQVIPNSKT

SEQ ID NO: 536 - protein, 14 aa, synthetic construct
GSPLQDRVGQNQQT

SEQ ID NO: 537 - protein, 14 aa, synthetic construct
GSGQNQYSSTNPQT

SEQ ID NO: 538 - protein, 14 aa, synthetic construct
GAMTVTISGQNQQT

SEQ ID NO: 539 - protein, 14 aa, synthetic construct
GSGQNQQLQTLIRT

SEQ ID NO: 540 - protein, 14 aa, synthetic construct
GSGLRQTSQQNQQT

SEQ ID NO: 541 - protein, 14 aa, synthetic construct
GSGQNQQTGLRQQT

SEQ ID NO: 542 - protein, 14 aa, synthetic construct
GSGQTRQMKDNQQT

SEQ ID NO: 543 - protein, 14 aa, synthetic construct
GSGQNHGLQSGQQT

SEQ ID NO: 544 - protein, 14 aa, synthetic construct
GSGQSHRQPENQQT

SEQ ID NO: 545 - protein, 14 aa, synthetic construct
GSGQDRHIVQNQQT

SEQ ID NO: 546 - protein, 14 aa, synthetic construct
GSGQNQQLPHSNLT

SEQ ID NO: 547 - protein, 14 aa, synthetic construct
GSGQLSVPYDNQQT

SEQ ID NO: 548 - protein, 14 aa, synthetic construct
GSGRNPQTQPLQQT

SEQ ID NO: 549 - protein, 14 aa, synthetic construct
GSGQPYSTGLNQQT

SEQ ID NO: 550 - protein, 14 aa, synthetic construct
GSGQNQQTHGGLRD

SEQ ID NO: 551 - protein, 14 aa, synthetic construct
GAYGMVSSGQNQQT

SEQ ID NO: 552 - protein, 14 aa, synthetic construct
GSGIQSSYSQNQQT

SEQ ID NO: 553 - protein, 14 aa, synthetic construct
GPRLSDQSGQNQQT

SEQ ID NO: 554 - protein, 14 aa, synthetic construct
GSGQNQQTHPSPCT

SEQ ID NO: 555 - protein, 14 aa, synthetic construct
GSGQSFQMHTNQQT

SEQ ID NO: 556 - protein, 14 aa, synthetic construct
GSGQNQQTGNPKHT

SEQ ID NO: 557 - protein, 14 aa, synthetic construct
GFSSAVHSGQNQQT

SEQ ID NO: 558 - protein, 14 aa, synthetic construct
GSGQNQQTSMSNAT

SEQ ID NO: 559 - protein, 14 aa, synthetic construct
GSGQDMKQHHNQQT

SEQ ID NO: 560 - protein, 14 aa, synthetic construct
GLRLSTPSGQNQQT

SEQ ID NO: 561 - protein, 14 aa, synthetic construct
GSGQNQQTSVYMNT

SEQ ID NO: 562 - protein, 14 aa, synthetic construct
GSGQNQYSQSSMQT

SEQ ID NO: 563 - protein, 14 aa, synthetic construct
GSGQNQQSMADHTT

SEQ ID NO: 564 - protein, 14 aa, synthetic construct
GWERSFVSGQNQQT

SEQ ID NO: 565 - protein, 14 aa, synthetic construct
GLLAGKSSGQNQQT

SEQ ID NO: 566 - protein, 14 aa, synthetic construct
GKSFVPQSGQNQQT

SEQ ID NO: 567 - protein, 14 aa, synthetic construct
GSGQMQSAGSNQQT

SEQ ID NO: 568 - protein, 14 aa, synthetic construct
GSDQNQRLTSSMQT

SEQ ID NO: 569 - protein, 14 aa, synthetic construct
GESRAVLSGQNQQT

SEQ ID NO: 570 - protein, 14 aa, synthetic construct
GSVFGVPSGQNQQT

SEQ ID NO: 571 - protein, 14 aa, synthetic construct
GSGLPDRNLQNQQT

SEQ ID NO: 572 - protein, 14 aa, synthetic construct
GSGTHNSAIQNQQT

SEQ ID NO: 573 - protein, 14 aa, synthetic construct
GSGMIIASMQNQQT

SEQ ID NO: 574 - protein, 14 aa, synthetic construct
GGITWTDSGQNQQT

SEQ ID NO: 575 - protein, 14 aa, synthetic construct
GSGQNQQASGRQQT

SEQ ID NO: 576 - protein, 14 aa, synthetic construct
GSGQNQQPHLKSLT

SEQ ID NO: 577 - protein, 14 aa, synthetic construct
GPPQHMTSGQNQQT

SEQ ID NO: 578 - protein, 14 aa, synthetic construct
GSGQNQQASLPSRT

SEQ ID NO: 579 - protein, 14 aa, synthetic construct
GSGQIVSTQTNQQT

SEQ ID NO: 580 - protein, 14 aa, synthetic construct
GSGKGHSAGQNQQT

SEQ ID NO: 581 - protein, 14 aa, synthetic construct
GSGQNTRLQLGQQT

SEQ ID NO: 582 - protein, 14 aa, synthetic construct
GSVGSRPVGQNQQT

SEQ ID NO: 583 - protein, 14 aa, synthetic construct
GSSHTLALGQNQQT

SEQ ID NO: 584 - protein, 14 aa, synthetic construct
GMYEYSQSGQNQQT

SEQ ID NO: 585 - protein, 14 aa, synthetic construct
GNGQNQQHSILHGT

SEQ ID NO: 586 - protein, 14 aa, synthetic construct
GSGYNQPHLQNQQT

SEQ ID NO: 587 - protein, 14 aa, synthetic construct
GPLVNASSGQNQQT

SEQ ID NO: 588 - protein, 14 aa, synthetic construct
GSGQNQQVLTTART

SEQ ID NO: 589 - protein, 14 aa, synthetic construct
GSGQNQHSVHNDQT

SEQ ID NO: 590 - protein, 14 aa, synthetic construct
GAGLIMHSGQNQQT

SEQ ID NO: 591 - protein, 14 aa, synthetic construct
GMGRHSASGQNQQT

SEQ ID NO: 592 - protein, 14 aa, synthetic construct
GSHSQSGHGQNQQT

SEQ ID NO: 593 - protein, 14 aa, synthetic construct
GSSTTIVSGQNHQT

SEQ ID NO: 594 - protein, 14 aa, synthetic construct
GRHLVTASGQNQQT

SEQ ID NO: 595 - protein, 14 aa, synthetic construct
GSGQNQQHANLNQT

SEQ ID NO: 596 - protein, 14 aa, synthetic construct
GSGSTHSKAQNQQT

SEQ ID NO: 597 - protein, 14 aa, synthetic construct
GSGQNKQMLSGNTT

SEQ ID NO: 598 - protein, 14 aa, synthetic construct
GSGQVHNPTQNQQT

SEQ ID NO: 599 - protein, 14 aa, synthetic construct
GSGQNQQIPHVHQT

SEQ ID NO: 600 - protein, 14 aa, synthetic construct
GSLHAGLSGQNQQT

SEQ ID NO: 601 - protein, 14 aa, synthetic construct
GPAQHGTSGQNQQT

SEQ ID NO: 602 - protein, 14 aa, synthetic construct
GEKAVTSSGQNQQT

SEQ ID NO: 603 - protein, 14 aa, synthetic construct
GSGQNQQTMANGQR

SEQ ID NO: 604 - protein, 14 aa, synthetic construct
GSGSPHSKDQNQQT

SEQ ID NO: 605 - protein, 14 aa, synthetic construct
GSFSMGYGGQNQQT

SEQ ID NO: 606 - protein, 14 aa, synthetic construct
GSGTHLVSLQNQQT

SEQ ID NO: 607 - protein, 14 aa, synthetic construct
GSGQMQPHVQNQQT

SEQ ID NO: 608 - protein, 14 aa, synthetic construct
GSGQNQQVAGLNNT

SEQ ID NO: 609 - protein, 14 aa, synthetic construct
GSSQNQQHDMRLRT

SEQ ID NO: 610 - protein, 14 aa, synthetic construct
GPASLPISGQNQQT

SEQ ID NO: 611 - protein, 14 aa, synthetic construct
GSGQNQQPPLATRT

SEQ ID NO: 612 - protein, 14 aa, synthetic construct
GSSRVPVSGQNQQT

SEQ ID NO: 613 - protein, 14 aa, synthetic construct
GSGQNQQTNLGHTT

SEQ ID NO: 614 - protein, 14 aa, synthetic construct
GSGQNQQLVSRVQT

SEQ ID NO: 615 - protein, 14 aa, synthetic construct
GPNSYPVSGQKQQT

SEQ ID NO: 616 - protein, 14 aa, synthetic construct
GHAHYQASGQNQQT

SEQ ID NO: 617 - protein, 14 aa, synthetic construct
GSGQALLSTGNQQT

SEQ ID NO: 618 - protein, 14 aa, synthetic construct
GSGQLPRQMTNQQT

SEQ ID NO: 619 - protein, 14 aa, synthetic construct
GSGFPKSTEQNQQT

SEQ ID NO: 620 - protein, 14 aa, synthetic construct
GSRETSLSGQNQQT

SEQ ID NO: 621 - protein, 14 aa, synthetic construct
GSGQNQQGTGVSHT

SEQ ID NO: 622 - protein, 14 aa, synthetic construct
GSRTVPVYGQNQQT

SEQ ID NO: 623 - protein, 14 aa, synthetic construct
GSNAQSAHGQNQQT

SEQ ID NO: 624 - protein, 14 aa, synthetic construct
GAFHLAASGQNQQT

SEQ ID NO: 625 - protein, 14 aa, synthetic construct
GSGQYRSSSDNQQT

SEQ ID NO: 626 - protein, 14 aa, synthetic construct
GSGQVYISTPNQQT

SEQ ID NO: 627 - protein, 14 aa, synthetic construct
GSGVSTQLLQNQQT

SEQ ID NO: 628 - protein, 14 aa, synthetic construct
GSGQLGLSVTNQQT

SEQ ID NO: 629 - protein, 14 aa, synthetic construct
GSGSNMRLSQNQQT

SEQ ID NO: 630 - protein, 14 aa, synthetic construct
GSGQNLHSGLPQQT

SEQ ID NO: 631 - protein, 14 aa, synthetic construct
GSSHTLALGQNKQT

SEQ ID NO: 632 - protein, 14 aa, synthetic construct
GSGQNQHSLPAHRT

SEQ ID NO: 633 - protein, 14 aa, synthetic construct
GSGQNQGTVYPNQT

SEQ ID NO: 634 - protein, 14 aa, synthetic construct
GSGQNQQPSLRQST

SEQ ID NO: 635 - protein, 14 aa, synthetic construct
GSGQNARLKDNQQT

SEQ ID NO: 636 - protein, 14 aa, synthetic construct
GHAGSTGSGQNQQT

SEQ ID NO: 637 - protein, 14 aa, synthetic construct
GSGQALSSSGNQQT

SEQ ID NO: 638 - protein, 14 aa, synthetic construct
GSGASESHRQNQQT

SEQ ID NO: 639 - protein, 14 aa, synthetic construct
GVGVITSSGQNQQT

SEQ ID NO: 640 - protein, 14 aa, synthetic construct
GSLYGQSLGQNQQT

SEQ ID NO: 641 - protein, 14 aa, synthetic construct
GSGQMSDVHGNQQT

SEQ ID NO: 642 - protein, 14 aa, synthetic construct
GSGQNQQHSSKATT

SEQ ID NO: 643 - protein, 14 aa, synthetic construct
GSGQNQQTSVSQQT

SEQ ID NO: 644 - protein, 14 aa, synthetic construct
GSGQKMWKLDNQQT

SEQ ID NO: 645 - protein, 14 aa, synthetic construct
GSGQNVSMQVNQQT

SEQ ID NO: 646 - protein, 14 aa, synthetic construct
GSGQNQRATLSNQT

SEQ ID NO: 647 - protein, 14 aa, synthetic construct
GSGQASSKSANQQT

SEQ ID NO: 648 - protein, 14 aa, synthetic construct
GSGKNQTPIPKGQT

SEQ ID NO: 649 - protein, 14 aa, synthetic construct
GSGQNQQTRQEGST

SEQ ID NO: 650 - protein, 14 aa, synthetic construct
GASSLATSGQNQQT

SEQ ID NO: 651 - protein, 14 aa, synthetic construct
GSGQRGSLTENQQT

SEQ ID NO: 652 - protein, 14 aa, synthetic construct
GSEQTRQRGQNQQT

SEQ ID NO: 653 - protein, 14 aa, synthetic construct
GSGQNQQTLTASKE

SEQ ID NO: 654 - protein, 14 aa, synthetic construct
GSGTSGKTGKNQQT

SEQ ID NO: 655 - protein, 14 aa, synthetic construct
GQLVTFTSGQNQQT

SEQ ID NO: 656 - protein, 14 aa, synthetic construct
GSGQNQQSANKILT

SEQ ID NO: 657 - protein, 14 aa, synthetic construct
GSGQNQQHHSSHTT

SEQ ID NO: 658 - protein, 14 aa, synthetic construct
GSGQNQKGMQPNQT

SEQ ID NO: 659 - protein, 14 aa, synthetic construct
GSGQLVSGLYNQQT

SEQ ID NO: 660 - protein, 14 aa, synthetic construct
GSSVGVPSGQNQQT

SEQ ID NO: 661 - protein, 14 aa, synthetic construct
GSGQNQQWDSRRQT

SEQ ID NO: 662 - protein, 14 aa, synthetic construct
GSEQTRQSGQNQQT

SEQ ID NO: 663 - protein, 14 aa, synthetic construct
GSGIGSHIPQNQQT

SEQ ID NO: 664 - protein, 14 aa, synthetic construct
GSGQNQRLHGVDQT

SEQ ID NO: 665 - protein, 14 aa, synthetic construct
GEVSRVLSGQNQQT

SEQ ID NO: 666 - protein, 14 aa, synthetic construct
GSGQNQQKVSPLLT

SEQ ID NO: 667 - protein, 14 aa, synthetic construct
GSGLALERSQNQQT

SEQ ID NO: 668 - protein, 14 aa, synthetic construct
GPDRIGSSGQNQQT

SEQ ID NO: 669 - protein, 14 aa, synthetic construct
GSGQNQDHQNKQQT

SEQ ID NO: 670 - protein, 14 aa, synthetic construct
GSGQNQQTALYNNT

SEQ ID NO: 671 - protein, 14 aa, synthetic construct
GSGAVHLTAQNQQT

SEQ ID NO: 672 - protein, 14 aa, synthetic construct
GSLVSTQSGQNQQT

SEQ ID NO: 673 - protein, 14 aa, synthetic construct
GSGVSARMVQNQQT

SEQ ID NO: 674 - protein, 14 aa, synthetic construct
GSGQTRMPLANQQT

SEQ ID NO: 675 - protein, 14 aa, synthetic construct
GSGISSRNMQNQQT

SEQ ID NO: 676 - protein, 14 aa, synthetic construct
GSGEKVHSGQNQQT

SEQ ID NO: 677 - protein, 14 aa, synthetic construct
GSGQNQQKLSSMST

SEQ ID NO: 678 - protein, 14 aa, synthetic construct
GSGQNQQTGQHMRV

SEQ ID NO: 679 - protein, 14 aa, synthetic construct
GSGMIHTTAQNQQT

SEQ ID NO: 680 - protein, 14 aa, synthetic construct
GSGQNWPALKGQQT

SEQ ID NO: 681 - protein, 14 aa, synthetic construct
GASHMSISGQNQQT

SEQ ID NO: 682 - protein, 14 aa, synthetic construct
GSDQNQQLGYSKQT

SEQ ID NO: 683 - protein, 14 aa, synthetic construct
GIPSIRESGQNQQT

SEQ ID NO: 684 - protein, 14 aa, synthetic construct
GSGIPSVKFQNQQT

SEQ ID NO: 685 - protein, 14 aa, synthetic construct
GSGQNQQTSVSQNV

SEQ ID NO: 686 - protein, 14 aa, synthetic construct
GSGQNQQIGESRMT

SEQ ID NO: 687 - protein, 14 aa, synthetic construct
GSGSSSMSFQNQQT

SEQ ID NO: 688 - protein, 14 aa, synthetic construct
GSGQKQERAVSKQT

SEQ ID NO: 689 - protein, 14 aa, synthetic construct
GCTTRLNSGQNQQT

SEQ ID NO: 690 - protein, 14 aa, synthetic construct
GSGQNQQIISTKIT

SEQ ID NO: 691 - protein, 14 aa, synthetic construct
GSGQNQQKSLNGNT

SEQ ID NO: 692 - protein, 14 aa, synthetic construct
GSGIPAPRLQNQQT

SEQ ID NO: 693 - protein, 14 aa, synthetic construct
GSGQIRESMGNQQT

SEQ ID NO: 694 - protein, 14 aa, synthetic construct
GSGQNSGVHFNQQT

SEQ ID NO: 695 - protein, 14 aa, synthetic construct
GSGQNIGHSLPQQT

SEQ ID NO: 696 - protein, 14 aa, synthetic construct
GSGERSISVQNQQT

SEQ ID NO: 697 - protein, 14 aa, synthetic construct
GSGLKPNVLQNQQT

SEQ ID NO: 698 - protein, 14 aa, synthetic construct
GSGQVAYAQGNQQT

SEQ ID NO: 699 - protein, 14 aa, synthetic construct
GSGQSSYGSGNQQT

SEQ ID NO: 700 - protein, 14 aa, synthetic construct
GSGQNQAMTHGDQT

SEQ ID NO: 701 - protein, 14 aa, synthetic construct
GSGQNQALVSMGQT

SEQ ID NO: 702 - protein, 14 aa, synthetic construct
GSGQNPSFMRGQQT

SEQ ID NO: 703 - protein, 14 aa, synthetic construct
GSGQNQQSHLRTNT

SEQ ID NO: 704 - protein, 14 aa, synthetic construct
GYTRLETSGQNQQT

SEQ ID NO: 705 - protein, 14 aa, synthetic construct
GSGQSYDMRGNQQT

SEQ ID NO: 706 - protein, 14 aa, synthetic construct
GSRTTQDIGQNQQT

SEQ ID NO: 707 - protein, 14 aa, synthetic construct
GSGHPYKAAQNQQT

SEQ ID NO: 708 - protein, 14 aa, synthetic construct
GRLSNAHGGQNQQT

SEQ ID NO: 709 - protein, 14 aa, synthetic construct
GSGQNQRAVLNDQT

SEQ ID NO: 710 - protein, 14 aa, synthetic construct
GGSHTYGGGQNQQT

SEQ ID NO: 711 - protein, 14 aa, synthetic construct
GSSVNSMIGQNQQT

SEQ ID NO: 712 - protein, 14 aa, synthetic construct
GNSSMMGSGQNQQT

SEQ ID NO: 713 - protein, 14 aa, synthetic construct
GNRDRPSSGQNQQT

SEQ ID NO: 714 - protein, 14 aa, synthetic construct
GSGNMHASRQNQQT

SEQ ID NO: 715 - protein, 14 aa, synthetic construct
GFIFPKVSGQNQQT

SEQ ID NO: 716 - protein, 14 aa, synthetic construct
GSGQNQQLKNSTST

SEQ ID NO: 717 - protein, 14 aa, synthetic construct
GSGQNQQSQYMPRT

SEQ ID NO: 718 - protein, 14 aa, synthetic construct
GSGQRMADIGNQQT

SEQ ID NO: 719 - protein, 14 aa, synthetic construct
GSGQNQSHYPSQQT

SEQ ID NO: 720 - protein, 14 aa, synthetic construct
GSDGKMHRGQNQQT

SEQ ID NO: 721 - protein, 14 aa, synthetic construct
GSGSVGFIGQNQQT

SEQ ID NO: 722 - protein, 14 aa, synthetic construct
GLHGMTLSGQNQQT

SEQ ID NO: 723 - protein, 14 aa, synthetic construct
GSDQSKRGDSNQQT

SEQ ID NO: 724 - protein, 14 aa, synthetic construct
GSLFLATGGQNQQT

SEQ ID NO: 725 - protein, 14 aa, synthetic construct
GSGQNQQPSAFSKT

SEQ ID NO: 726 - protein, 14 aa, synthetic construct
GSGQLPQSGLNQQT

SEQ ID NO: 727 - protein, 14 aa, synthetic construct
GSGSKQNALQNQQT

SEQ ID NO: 728 - protein, 14 aa, synthetic construct
GSGQRRELSQNQQT

SEQ ID NO: 729 - protein, 14 aa, synthetic construct
GSGQREPKASNQQT

SEQ ID NO: 730 - protein, 14 aa, synthetic construct
GSGQNQQHPSTQQT

SEQ ID NO: 731 - protein, 14 aa, synthetic construct
GSQSTLGLGQNQQT

SEQ ID NO: 732 - protein, 14 aa, synthetic construct
GSGQNQQMPGLSST

SEQ ID NO: 733 - protein, 14 aa, synthetic construct
GSGQNQQTVGGKNL

SEQ ID NO: 734 - protein, 14 aa, synthetic construct
GSSREFHSGQNQQT

SEQ ID NO: 735 - protein, 14 aa, synthetic construct
GSGQNQQTVPSNLV

SEQ ID NO: 736 - protein, 14 aa, synthetic construct
GSGQNAYSSQAQQT

SEQ ID NO: 737 - protein, 14 aa, synthetic construct
GSGQNKDHSTRRQT

SEQ ID NO: 738 - protein, 14 aa, synthetic construct
GQLGSVGSGQDQQT

SEQ ID NO: 739 - protein, 14 aa, synthetic construct
GSGQHAAPGHNQQT

SEQ ID NO: 740 - protein, 14 aa, synthetic construct
GSGQNQQTSQSPPT

SEQ ID NO: 741 - protein, 14 aa, synthetic construct
GSGNYRDHEQNQQT

SEQ ID NO: 742 - protein, 14 aa, synthetic construct
GSGQHSNQHVNQQT

SEQ ID NO: 743 - protein, 14 aa, synthetic construct
GSGQTARNGINQQT

SEQ ID NO: 744 - protein, 14 aa, synthetic construct
GSGQNQQHYGSQGT

SEQ ID NO: 745 - protein, 14 aa, synthetic construct
GSGSPQASRQNQQT

SEQ ID NO: 746 - protein, 14 aa, synthetic construct
GSGFSHSMGKNQQT

SEQ ID NO: 747 - protein, 14 aa, synthetic construct
GSGQSHSLETNQQT

SEQ ID NO: 748 - protein, 14 aa, synthetic construct
GTEQTRQSGQNQQT

SEQ ID NO: 749 - protein, 14 aa, synthetic construct
GSGRHLASVQNQQT

SEQ ID NO: 750 - protein, 14 aa, synthetic construct
GLGSKNHSGQNQQT

SEQ ID NO: 751 - protein, 14 aa, synthetic construct
GSGQNQQTSHFPSA

SEQ ID NO: 752 - protein, 14 aa, synthetic construct
GSGQLSGTPQNQQT

SEQ ID NO: 753 - protein, 14 aa, synthetic construct
GSGQNQQAPHKKET

SEQ ID NO: 754 - protein, 14 aa, synthetic construct
GSGQNQQTLRGSLE

SEQ ID NO: 755 - protein, 14 aa, synthetic construct
GSIAMTSHGQNQQT

SEQ ID NO: 756 - protein, 14 aa, synthetic construct
GSPGVSPSGQNQQT

SEQ ID NO: 757 - protein, 14 aa, synthetic construct
GSGQNQQTGSSSRV

SEQ ID NO: 758 - protein, 14 aa, synthetic construct
GSGQHLPLLGNQQT

SEQ ID NO: 759 - protein, 14 aa, synthetic construct
GSDHSHRGGQNQQT

SEQ ID NO: 760 - protein, 14 aa, synthetic construct
GSGIVTKLGQNQQT

SEQ ID NO: 761 - protein, 14 aa, synthetic construct
GSGQDVTKTGNQQT

SEQ ID NO: 762 - protein, 14 aa, synthetic construct
GSGQNQQSHGRIGT

SEQ ID NO: 763 - protein, 14 aa, synthetic construct
GSGQNQQINHRSPT

SEQ ID NO: 764 - protein, 14 aa, synthetic construct
GSGDDSRVGQNQQT

SEQ ID NO: 765 - protein, 14 aa, synthetic construct
GSGQSTLKRINQQT

SEQ ID NO: 766 - protein, 14 aa, synthetic construct
GSGSQHSKAQNQQT

SEQ ID NO: 767 - protein, 14 aa, synthetic construct
GSGQNQQHASSNNT

SEQ ID NO: 768 - protein, 14 aa, synthetic construct
GSRTYQVSGQNQQT

SEQ ID NO: 769 - protein, 14 aa, synthetic construct
GSGQNQGLLSSPQT

SEQ ID NO: 770 - protein, 14 aa, synthetic construct
GSGGGLQHNQNQQT

SEQ ID NO: 771 - protein, 14 aa, synthetic construct
GSGQNQQTTAATRM

SEQ ID NO: 772 - protein, 14 aa, synthetic construct
GSGQNQRASILVQT

SEQ ID NO: 773 - protein, 14 aa, synthetic construct
GSGQNLGLLGAQQT

SEQ ID NO: 774 - protein, 14 aa, synthetic construct
GSLDLGRSGQNQQT

SEQ ID NO: 775 - protein, 14 aa, synthetic construct
GNSQVKVSGQNQQT

SEQ ID NO: 776 - protein, 14 aa, synthetic construct
GSSGSHQYGQNQQT

SEQ ID NO: 777 - protein, 14 aa, synthetic construct
GSGQNQQQRDGTLT

SEQ ID NO: 778 - protein, 14 aa, synthetic construct
GRGQHVSVANNQQT

SEQ ID NO: 779 - protein, 14 aa, synthetic construct
GDSSSRISGQNQQT

SEQ ID NO: 780 - protein, 14 aa, synthetic construct
GSGQNQQHSLSSQT

SEQ ID NO: 781 - protein, 14 aa, synthetic construct
GSLMDVHRGQNQQT

SEQ ID NO: 782 - protein, 14 aa, synthetic construct
GSIQYQSSGQNQQT

SEQ ID NO: 783 - protein, 14 aa, synthetic construct
GLGSKNPSGQNQQT

SEQ ID NO: 784 - protein, 14 aa, synthetic construct
GSGQLVLTLQNQQT

SEQ ID NO: 785 - protein, 14 aa, synthetic construct
GSGQNQQTSQPLPG

SEQ ID NO: 786 - protein, 14 aa, synthetic construct
GSGQNQQNLGKLNT

SEQ ID NO: 787 - protein, 14 aa, synthetic construct
GTTAHQPSGQNQQT

SEQ ID NO: 788 - protein, 14 aa, synthetic construct
GSGQNRAQIGTQQT

SEQ ID NO: 789 - protein, 14 aa, synthetic construct
GSGQYVHVSSNQQT

SEQ ID NO: 790 - protein, 14 aa, synthetic construct
GSGQNQQTAHAFNI

SEQ ID NO: 791 - protein, 14 aa, synthetic construct
GSGQNQRTMVATQT

SEQ ID NO: 792 - protein, 14 aa, synthetic construct
GSGQNPIRGAMQQT

SEQ ID NO: 793 - protein, 14 aa, synthetic construct
GSGYVITGSQNQQT

SEQ ID NO: 794 - protein, 14 aa, synthetic construct
GRGPKQSNIQNQQT

SEQ ID NO: 795 - protein, 14 aa, synthetic construct
GSGQNQQTMLGKPC

SEQ ID NO: 796 - protein, 14 aa, synthetic construct
GSGQNQQVGSTVRT

SEQ ID NO: 797 - protein, 14 aa, synthetic construct
GNVTTQKSGQNQQT

SEQ ID NO: 798 - protein, 14 aa, synthetic construct
GSGNPVSHLQNQQT

SEQ ID NO: 799 - protein, 14 aa, synthetic construct
GSLSHMESGQNQQT

SEQ ID NO: 800 - protein, 14 aa, synthetic construct
GRAPTNLSGQNQQT

SEQ ID NO: 801 - protein, 14 aa, synthetic construct
GSGQNQQTVMTARA

SEQ ID NO: 802 - protein, 14 aa, synthetic construct
GSGMPASRLQNQQT

SEQ ID NO: 803 - protein, 14 aa, synthetic construct
GVVRNHQSGQNQQT

SEQ ID NO: 804 - protein, 14 aa, synthetic construct
GSGQNQHSVQVRQT

SEQ ID NO: 805 - protein, 14 aa, synthetic construct
GSGQNTGHLTMQQT

SEQ ID NO: 806 - protein, 14 aa, synthetic construct
GSGQNQQYAGKILT

SEQ ID NO: 807 - protein, 14 aa, synthetic construct
GSGNPHVRNQNQQT

SEQ ID NO: 808 - protein, 14 aa, synthetic construct
GSGQNGGSSNRQQT

SEQ ID NO: 809 - protein, 14 aa, synthetic construct
GSGQRLSQGVNHQT

SEQ ID NO: 810 - protein, 14 aa, synthetic construct
GSGQNAHAKEGQQT

SEQ ID NO: 811 - protein, 14 aa, synthetic construct
GSSPAPNSGQNQQT

SEQ ID NO: 812 - protein, 14 aa, synthetic construct
GLAHKTSSGQNQQT

SEQ ID NO: 813 - protein, 14 aa, synthetic construct
GSGQNQQTPGAHKT

SEQ ID NO: 814 - protein, 14 aa, synthetic construct
GSGQNQQSLSGSFT

SEQ ID NO: 815 - protein, 14 aa, synthetic construct
GSGQNQQSTGTSRT

SEQ ID NO: 816 - protein, 14 aa, synthetic construct
GSGQNQQTVQSNLV

SEQ ID NO: 817 - protein, 14 aa, synthetic construct
GSGQNQQLGSRQCT

SEQ ID NO: 818 - protein, 14 aa, synthetic construct
GSGQNQYLRLELQT

SEQ ID NO: 819 - protein, 14 aa, synthetic construct
GSGQNQQTSPRLQT

SEQ ID NO: 820 - protein, 14 aa, synthetic construct
GSGQNQQTTSSNMT

SEQ ID NO: 821 - protein, 14 aa, synthetic construct
GTASTYNSGQNQQT

SEQ ID NO: 822 - protein, 14 aa, synthetic construct
GSGQNQQTMPQHKI

SEQ ID NO: 823 - protein, 14 aa, synthetic construct
GSGQSHLHTGNQQT

SEQ ID NO: 824 - protein, 14 aa, synthetic construct
GVKGVGHSGQNQQT

SEQ ID NO: 825 - protein, 14 aa, synthetic construct
GSGKVTKQSQNQQT

SEQ ID NO: 826 - protein, 14 aa, synthetic construct
GSGQNQQTALEKSL

SEQ ID NO: 827 - protein, 14 aa, synthetic construct
GSGYKDTYGQNQQT

SEQ ID NO: 828 - protein, 14 aa, synthetic construct
GSGQNQQSGTFLST

SEQ ID NO: 829 - protein, 14 aa, synthetic construct
GSGQNTGQHMMQQT

SEQ ID NO: 830 - protein, 14 aa, synthetic construct
GSGKNQQRPGLDQT

SEQ ID NO: 831 - protein, 14 aa, synthetic construct
GSGQSREISLNQQT

SEQ ID NO: 832 - protein, 14 aa, synthetic construct
GTPTSPSSGQNQQT

SEQ ID NO: 833 - protein, 14 aa, synthetic construct
GKPAGGLSGQNQQT

SEQ ID NO: 834 - protein, 14 aa, synthetic construct
GSGQNHRSADMQQT

SEQ ID NO: 835 - protein, 14 aa, synthetic construct
GSGQNQQTLPSLSL

SEQ ID NO: 836 - protein, 14 aa, synthetic construct
GSPYMGATGQNQQT

SEQ ID NO: 837 - protein, 14 aa, synthetic construct
GSGHAKAVGQNQQT

SEQ ID NO: 838 - protein, 14 aa, synthetic construct
GHMKGVTSGQNQQT

SEQ ID NO: 839 - protein, 14 aa, synthetic construct
GSGQNQKILTLDQT

SEQ ID NO: 840 - protein, 14 aa, synthetic construct
GSGQNQQTKVGHSA

SEQ ID NO: 841 - protein, 14 aa, synthetic construct
GIARTTISGQNQQT

SEQ ID NO: 842 - protein, 14 aa, synthetic construct
GSGQNQQTSVGFRT

SEQ ID NO: 843 - protein, 14 aa, synthetic construct
GSGQNQQTMIANIR

SEQ ID NO: 844 - protein, 14 aa, synthetic construct
GDMTRSSSGQNQQT

SEQ ID NO: 845 - protein, 14 aa, synthetic construct
GSGHMSDLRQNQQT

SEQ ID NO: 846 - protein, 14 aa, synthetic construct
GRGAVMASGQNQQT

SEQ ID NO: 847 - protein, 14 aa, synthetic construct
GSGQNQQLSGKSVT

SEQ ID NO: 848 - protein, 14 aa, synthetic construct
GSHTLVVSGQNQQT

SEQ ID NO: 849 - protein, 14 aa, synthetic construct
GSGPWSAGLQNQQT

SEQ ID NO: 850 - protein, 14 aa, synthetic construct
GSGQHSPHALNQQT

SEQ ID NO: 851 - protein, 14 aa, synthetic construct
GSGQNQQPNSGSMT

SEQ ID NO: 852 - protein, 14 aa, synthetic construct
GSGLAHLGGQNQQT

SEQ ID NO: 853 - protein, 14 aa, synthetic construct
GSSVRYEPKQNQQT

SEQ ID NO: 854 - protein, 14 aa, synthetic construct
GSGQNQQARPLELT

SEQ ID NO: 855 - protein, 14 aa, synthetic construct
GSGQPRSTGINQQT

SEQ ID NO: 856 - protein, 14 aa, synthetic construct
GSGQNQANWVKVQT

SEQ ID NO: 857 - protein, 14 aa, synthetic construct
GSGHLFQSGQNQQT

SEQ ID NO: 858 - protein, 14 aa, synthetic construct
GSGQNRGISISQQT

SEQ ID NO: 859 - protein, 14 aa, synthetic construct
GSGTHYDNRQNQQT

SEQ ID NO: 860 - protein, 14 aa, synthetic construct
GSGQNQQTSTTPLP

SEQ ID NO: 861 - protein, 14 aa, synthetic construct
GSGQVHASQVNQKT

SEQ ID NO: 862 - protein, 14 aa, synthetic construct
GSSGHRESGQNQQT

SEQ ID NO: 863 - protein, 14 aa, synthetic construct
GLSAEKSSGQNQQT

SEQ ID NO: 864 - protein, 14 aa, synthetic construct
GSGQEHRSLANQQT

SEQ ID NO: 865 - protein, 14 aa, synthetic construct
GSGQTVVRIANQQT

SEQ ID NO: 866 - protein, 14 aa, synthetic construct
GSGQNVSSVHRQQT

SEQ ID NO: 867 - protein, 14 aa, synthetic construct
GSGASRMSIQNQQT

SEQ ID NO: 868 - protein, 14 aa, synthetic construct
GVAFIGSSGQNQQT

SEQ ID NO: 869 - protein, 14 aa, synthetic construct
GSGQNQQTVPTRQT

SEQ ID NO: 870 - protein, 14 aa, synthetic construct
GSGQAAKSSQNQQT

SEQ ID NO: 871 - protein, 14 aa, synthetic construct
GSGQNQQVAIRTST

SEQ ID NO: 872 - protein, 14 aa, synthetic construct
GSVHMQNAGQNQQT

SEQ ID NO: 873 - protein, 14 aa, synthetic construct
GSGMRQAGVQNQQT

SEQ ID NO: 874 - protein, 14 aa, synthetic construct
GSGQNQQVGGKTVT

SEQ ID NO: 875 - protein, 14 aa, synthetic construct
GVHDMRVSGQNQQT

SEQ ID NO: 876 - protein, 14 aa, synthetic construct
GSGQHVSVANNQQT

SEQ ID NO: 877 - protein, 14 aa, synthetic construct
GSAAMSVRGQNQQT

SEQ ID NO: 878 - protein, 14 aa, synthetic construct
GVSRGGPSGQNQQT

SEQ ID NO: 879 - protein, 14 aa, synthetic construct
GSGQMVHTIGNQQT

SEQ ID NO: 880 - protein, 14 aa, synthetic construct
GRGGSMAETQNQQT

SEQ ID NO: 881 - protein, 14 aa, synthetic construct
GSGHTNPTRQNQQT

SEQ ID NO: 882 - protein, 14 aa, synthetic construct
GSGEAARYEQNQQT

SEQ ID NO: 883 - protein, 14 aa, synthetic construct
GSGQNERHLVLQQT

SEQ ID NO: 884 - protein, 14 aa, synthetic construct
GSGQNQQSKQQVLT

SEQ ID NO: 885 - protein, 14 aa, synthetic construct
GSGQARAHRGNQQT

SEQ ID NO: 886 - protein, 14 aa, synthetic construct
GSGQNQQPLDTSRT

SEQ ID NO: 887 - protein, 14 aa, synthetic construct
GSGQNQQLANMVTT

SEQ ID NO: 888 - protein, 14 aa, synthetic construct
GSGQMKDLHRNQQT

SEQ ID NO: 889 - protein, 14 aa, synthetic construct
GSGQNQHLSSFVQT

SEQ ID NO: 890 - protein, 14 aa, synthetic construct
GSGQNQQPSSRVTT

SEQ ID NO: 891 - protein, 14 aa, synthetic construct
GSGQNQQLAITLGT

SEQ ID NO: 892 - protein, 14 aa, synthetic construct
GSGQNQQTVGNPAT

SEQ ID NO: 893 - protein, 14 aa, synthetic construct
GSGQNQGRAHPMQT

SEQ ID NO: 894 - protein, 14 aa, synthetic construct
GSGQLIASVVNQQT

SEQ ID NO: 895 - protein, 14 aa, synthetic construct
GSSVRSLVGQNQQT

SEQ ID NO: 896 - protein, 14 aa, synthetic construct
GGAGSAHSGQNQQT

SEQ ID NO: 897 - protein, 14 aa, synthetic construct
GSDQNQQTMSSTRT

SEQ ID NO: 898 - protein, 14 aa, synthetic construct
GSGQNQQMAGAFRT

SEQ ID NO: 899 - protein, 14 aa, synthetic construct
GSLGNLQRGQNQQT

SEQ ID NO: 900 - protein, 14 aa, synthetic construct
GSGPSISHGQNQQT

SEQ ID NO: 901 - protein, 14 aa, synthetic construct
GSGQNQQSSFNVQT

SEQ ID NO: 902 - protein, 14 aa, synthetic construct
GSGQNQQTGQATHN

SEQ ID NO: 903 - protein, 14 aa, synthetic construct
VSGSPHSKAQNQQT

SEQ ID NO: 904 - protein, 14 aa, synthetic construct
CSGSPHSKAQNQQT

SEQ ID NO: 905 - protein, 14 aa, synthetic construct
GSGSPHRKAQNQQT

SEQ ID NO: 906 - protein, 14 aa, synthetic construct
GRGSPHSKAQNQQT

SEQ ID NO: 907 - protein, 14 aa, synthetic construct
GSGSPHSKAQNKQT

SEQ ID NO: 908 - protein, 14 aa, synthetic construct
GSGSPHSKAQTQQT

SEQ ID NO: 909 - protein, 14 aa, synthetic construct
GSGSTHASRQNQQT

SEQ ID NO: 910 - protein, 14 aa, synthetic construct
GSGSPHKYGQNQQT

SEQ ID NO: 911 - protein, 14 aa, synthetic construct
GSGSPHKFGQNQQT

SEQ ID NO: 912 - protein, 14 aa, synthetic construct
VSGSPHKFGQNQQT

SEQ ID NO: 913 - protein, 14 aa, synthetic construct
GSGSPHSKAQNHQT

SEQ ID NO: 914 - protein, 14 aa, synthetic construct
GSGSPHSKAQHQQT

SEQ ID NO: 915 - protein, 14 aa, synthetic construct
GSGSPHKTYQNQQT

SEQ ID NO: 916 - protein, 14 aa, synthetic construct
VSGSPHASRQNQQT

SEQ ID NO: 917 - protein, 14 aa, synthetic construct
GSGSPHKFGKNQQT

SEQ ID NO: 918 - protein, 14 aa, synthetic construct
GSGSPHASRQNQHT

SEQ ID NO: 919 - protein, 14 aa, synthetic construct
GSHSPHKSGQNQQT

SEQ ID NO: 920 - protein, 14 aa, synthetic construct
GSGQNQQRRMSPST

SEQ ID NO: 921 - protein, 14 aa, synthetic construct
GSGSPHSKPQNQQT

SEQ ID NO: 922 - protein, 14 aa, synthetic construct
GSGSPHKFGQKQQT

SEQ ID NO: 923 - protein, 14 aa, synthetic construct
VSGSPHGARQNQQT

SEQ ID NO: 924 - protein, 14 aa, synthetic construct
GSGSPHSKAQKQQT

SEQ ID NO: 925 - protein, 14 aa, synthetic construct
GSHSPHKRGQNQQT

SEQ ID NO: 926 - protein, 14 aa, synthetic construct
GSGQNRQRLKGLET

SEQ ID NO: 927 - protein, 14 aa, synthetic construct
GSGSPHKLGQNQQT

SEQ ID NO: 928 - protein, 14 aa, synthetic construct
GSGSPHKTSKNQQT

SEQ ID NO: 929 - protein, 14 aa, synthetic construct
GSGSPHKIGQNQQT

SEQ ID NO: 930 - protein, 14 aa, synthetic construct
GSGQDSPHVRNQQT

SEQ ID NO: 931 - protein, 14 aa, synthetic construct
GSGSPHKTSQNQQT

SEQ ID NO: 932 - protein, 14 aa, synthetic construct
GSGSPHASRKNQQT

SEQ ID NO: 933 - protein, 14 aa, synthetic construct
GSHSPHKSGQKQQT

SEQ ID NO: 934 - protein, 14 aa, synthetic construct
GSGSPHKTSQKQQT

SEQ ID NO: 935 - protein, 14 aa, synthetic construct
GSGSPHVRGQNKQT

SEQ ID NO: 936 - protein, 14 aa, synthetic construct
GSGSPHKTTQNQQT

SEQ ID NO: 937 - protein, 14 aa, synthetic construct
GSGPVRALRQNQQT

SEQ ID NO: 938 - protein, 14 aa, synthetic construct
GSGSPHVRGQKQQT

SEQ ID NO: 939 - protein, 14 aa, synthetic construct
CSGSPHKTSQNQQT

SEQ ID NO: 940 - protein, 14 aa, synthetic construct
CSHSPHKSGQNQQT

SEQ ID NO: 941 - protein, 6 aa, synthetic construct
SPHSKA

SEQ ID NO: 942 - DNA, 18 bp, synthetic construct
  source 1..18: mol_type = other DNA
agcccacacagcaaagca

SEQ ID NO: 943 - protein, 8 aa, synthetic construct
HDSPHKSG

SEQ ID NO: 944 - DNA, 24 bp, synthetic construct
  source 1..24: mol_type = other DNA
cacgacagcccacacaaaagcgga

SEQ ID NO: 945 - protein, 6 aa, synthetic construct
SPHSKA

SEQ ID NO: 946 - protein, 6 aa, synthetic construct
SPHKSG

SEQ ID NO: 947 - protein, 6 aa, synthetic construct
SPHARM

SEQ ID NO: 948 - protein, 6 aa, synthetic construct
SPHVKS

SEQ ID NO: 949 - protein, 6 aa, synthetic construct
SPHASR

SEQ ID NO: 950 - protein, 6 aa, synthetic construct
SPHVKI

SEQ ID NO: 951 - protein, 6 aa, synthetic construct
SPHKSR

SEQ ID NO: 952 - protein, 6 aa, synthetic construct
SPHSLR

SEQ ID NO: 953 - protein, 6 aa, synthetic construct
SPHSKW

SEQ ID NO: 954 - protein, 6 aa, synthetic construct
SPHKKN

SEQ ID NO: 955 - protein, 6 aa, synthetic construct
SPHVRM

SEQ ID NO: 956 - protein, 6 aa, synthetic construct
SPHRKA

SEQ ID NO: 957 - protein, 6 aa, synthetic construct
SPHKFG

SEQ ID NO: 958 - protein, 6 aa, synthetic construct
SPHKIG

SEQ ID NO: 959 - protein, 6 aa, synthetic construct
SPHKLG

SEQ ID NO: 960 - protein, 6 aa, synthetic construct
SPHSKL

SEQ ID NO: 961 - protein, 6 aa, synthetic construct
SPHSRG

SEQ ID NO: 962 - protein, 6 aa, synthetic construct
SPHSKS

SEQ ID NO: 963 - protein, 6 aa, synthetic construct
SPHKTS

SEQ ID NO: 964 - protein, 6 aa, synthetic construct
SPHKTT

SEQ ID NO: 965 - protein, 6 aa, synthetic construct
SPHKTY

SEQ ID NO: 966 - protein, 6 aa, synthetic construct
SPHKYG

SEQ ID NO: 967 - protein, 6 aa, synthetic construct
SPHSKD

SEQ ID NO: 968 - protein, 6 aa, synthetic construct
SPHSKP

SEQ ID NO: 969 - protein, 6 aa, synthetic construct
SPHSRA

SEQ ID NO: 970 - protein, 6 aa, synthetic construct
SPHSSR

SEQ ID NO: 971 - protein, 6 aa, synthetic construct
SPHWKA

SEQ ID NO: 972 - protein, 6 aa, synthetic construct
SPHTRG

SEQ ID NO: 973 - protein, 6 aa, synthetic construct
SPHVRG

SEQ ID NO: 974 - protein, 6 aa, synthetic construct
SPHKRG

SEQ ID NO: 975 - protein, 6 aa, synthetic construct
SPHGAR

SEQ ID NO: 976 - protein, 6 aa, synthetic construct
SPHRSG

SEQ ID NO: 977 - protein, 6 aa, synthetic construct
SPHKSA

SEQ ID NO: 978 - protein, 6 aa, synthetic construct
SPHSKR

SEQ ID NO: 979 - protein, 6 aa, synthetic construct
SPHFLR

SEQ ID NO: 980 - protein, 6 aa, synthetic construct
SPHVRR

SEQ ID NO: 981 - protein, 742 aa, synthetic construct
MAADGYLPDWLEDNLSEGIREWWALKPGAPQPKANQQHQDNARGLVLPGYKYLGPGNGLDKGEPVNAADAAALEHDKAYDQQLKAGDNPYLKYNHADAEFQERLKEDTSFGGNLGRAVFQAKKRLLEPLGLVEEAAKTAPGKKRPVEQSPQEPDSSAGIGKSGAQPAKKRLNFGQTGDTESVPDPQPIGEPPAAPSGVGSLTMASGGGAPVADNNEGADGVGSSSGNWHCDSQWLGDRVITTSTRTWALPTYNNHLYKQISNSTSGGSSNDNAYFGYSTPWGYFDFNRFHCHFSPRDWQRLINNNWGFRPKRLNFKLFNIQVKEVTDNNGVKTIANNLTSTVQVFTDSDYQLPYVLGSAHEGCLPPFPADVFMIPQYGYLTLNDGSQAVGRSSFYCLEYFPSQMLRTGNNFQFSYEFENVPFHSSYAHSQSLDRLMNPLIDQYLYYLSKTINGSGSPHSKAQNQQTLKFSVAGPSNMAVQGRNYIPGPSYRQQRVSTTVTQNNNSEFAWPGASSWALNGRNSLMNPGPAMASHKEGEDRFFPLSGSLIFGKQGTGRDNVDADKVMITNEEEIKTTNPVATESYGQVATNHQSAQAQAQTGWVQNQGILPGMVWQDRDVYLQGPIWAKIPHTDGNFHPSPLMGGFGMKHPPPQILIKNTPVPADPPTAFNKDKLNSFITQYSTGQVSVEIEWELQKENSKRWNPEIQYTSNYYKSNNVEFAVNTEGVYSEPRPIGTRYLTRNL

SEQ ID NO: 982 - protein, 742 aa, synthetic construct
MAADGYLPDWLEDNLSEGIREWWALKPGAPQPKANQQHQDNARGLVLPGYKYLGPGNGLDKGEPVNAADAAALEHDKAYDQQLKAGDNPYLKYNHADAEFQERLKEDTSFGGNLGRAVFQAKKRLLEPLGLVEEAAKTAPGKKRPVEQSPQEPDSSAGIGKSGAQPAKKRLNFGQTGDTESVPDPQPIGEPPAAPSGVGSLTMASGGGAPVADNNEGADGVGSSSGNWHCDSQWLGDRVITTSTRTWALPTYNNHLYKQISNSTSGGSSNDNAYFGYSTPWGYFDFNRFHCHFSPRDWQRLINNNWGFRPKRLNFKLFNIQVKEVTDNNGVKTIANNLTSTVQVFTDSDYQLPYVLGSAHEGCLPPFPADVFMIPQYGYLTLNDGSQAVGRSSFYCLEYFPSQMLRTGNNFQFSYEFENVPFHSSYAHSQSLDRLMNPLIDQYLYYLSKTINGHDSPHKSGQNQQTLKFSVAGPSNMAVQGRNYIPGPSYRQQRVSTTVTQNNNSEFAWPGASSWALNGRNSLMNPGPAMASHKEGEDRFFPLSGSLIFGKQGTGRDNVDADKVMITNEEEIKTTNPVATESYGQVATNHQSAQAQAQTGWVQNQGILPGMVWQDRDVYLQGPIWAKIPHTDGNFHPSPLMGGFGMKHPPPQILIKNTPVPADPPTAFNKDKLNSFITQYSTGQVSVEIEWELQKENSKRWNPEIQYTSNYYKSNNVEFAVNTEGVYSEPRPIGTRYLTRNL

SEQ ID NO: 983 - DNA, 2229 bp, synthetic construct
  source 1..2229: mol_type = other DNA
atggctgccgatggttatcttccagattggctcgaggacaaccttagtgaaggaattcgcgagtggtgggctttgaaacctggagcccctcaacccaaggcaaatcaacaacatcaagacaacgctcgaggtcttgtgcttccgggttacaaataccttggacccggcaacggactcgacaagggggagccggtcaacgcagcagacgcggcggccctcgagcacgacaaggcctacgaccagcagctcaaggccggagacaacccgtacctcaagtacaaccacgccgacgccgagttccaggagcggctcaaagaagatacgtcttttgggggcaacctcgggcgagcagtcttccaggccaaaaagaggcttcttgaacctcttggtctggttgaggaagcggctaagacggctcctggaaagaagaggcctgtagagcagtctcctcaggaaccggactcctccgcgggtattggcaaatcgggtgcacagcccgctaaaaagagactcaatttcggtcagactggcgacacagagtcagtcccagaccctcaaccaatcggagaacctcccgcagccccctcaggtgtgggatctcttacaatggcttcaggtggtggcgcaccagtggcagacaataacgaaggtgccgatggagtgggtagttcctcgggaaattggcattgcgattcccaatggctgggggacagagtcatcaccaccagcacccgaacctgggccctgcccacctacaacaatcacctctacaagcaaatctccaacagcacatctggaggatcttcaaatgacaacgcctacttcggctacagcaccccctgggggtattttgacttcaacagattccactgccacttctcaccacgtgactggcagcgactcatcaacaacaactggggattccggcctaagcgactcaacttcaagctcttcaacattcaggtcaaagaggttacggacaacaatggagtcaagaccatcgccaataaccttaccagcacggtccaggtcttcacggactcagactatcagctcccgtacgtgctcgggtcggctcacgagggctgcctcccgccgttcccagcggacgttttcatgattcctcagtacgggtatctgacgcttaatgatggaagccaggccgtgggtcgttcgtccttttactgcctggaatatttcccgtcgcaaatgctaagaacgggtaacaacttccagttcagctacgagtttgagaacgtacctttccatagcagctacgctcacagccaaagcctggaccgactaatgaatccactcatcgaccaatacttgtattacttgagtaaaacaattaacggaagcggaagcccacacagcaaagcacaaaaccaacagaccttgaagttttcggtagctggtcctagcaacatggctgtccagggaagaaactacatacctggacccagctaccgacaacaacgtgtctcaaccactgtgactcaaaacaacaacagcgaatttgcttggcctggagcttcttcttgggctctcaatggacgtaatagcttgatgaatcctggacctgctatggccagccacaaagaaggagaggaccgtttctttcctttgtctggatctttaatttttggcaaacaaggaactggaagagacaacgtggatgcggacaaagtcatgataaccaacgaagaagaaattaaaactactaacccggtagcaacggagtcctatggacaagtggccacaaaccaccagagtgcccaagcacaggcgcagaccggctgggttcaaaaccaaggaatacttccgggtatggtttggcaggacagagatgtgtacctgcaaggacccatttgggccaaaattcctcacacggacggcaactttcacccttctccgctgatgggagggtttggaatgaagcacccgcctcctcagatcctcatcaaaaacacacctgtacctgcggatcctccaacggccttcaacaaggacaagctgaactctttcatcacccagtattctactggccaagtcagcgtggagatcgagtgggagctgcagaaggaaaacagcaagcgctggaacccggagatccagtacacttccaactattacaagtctaataatgttgaatttgctgttaatactgaaggtgtatatagtgaaccccgccccattggcacgcggtatttaacgaggaacttataa

SEQ ID NO: 984 - DNA, 2229 bp, synthetic construct
  source 1..2229: mol_type = other DNA
atggctgccgatggttatcttccagattggctcgaggacaaccttagtgaaggaattcgcgagtggtgggctttgaaacctggagcccctcaacccaaggcaaatcaacaacatcaagacaacgctcgaggtcttgtgcttccgggttacaaataccttggacccggcaacggactcgacaagggggagccggtcaacgcagcagacgcggcggccctcgagcacgacaaggcctacgaccagcagctcaaggccggagacaacccgtacctcaagtacaaccacgccgacgccgagttccaggagcggctcaaagaagatacgtcttttgggggcaacctcgggcgagcagtcttccaggccaaaaagaggcttcttgaacctcttggtctggttgaggaagcggctaagacggctcctggaaagaagaggcctgtagagcagtctcctcaggaaccggactcctccgcgggtattggcaaatcgggtgcacagcccgctaaaaagagactcaatttcggtcagactggcgacacagagtcagtcccagaccctcaaccaatcggagaacctcccgcagccccctcaggtgtgggatctcttacaatggcttcaggtggtggcgcaccagtggcagacaataacgaaggtgccgatggagtgggtagttcctcgggaaattggcattgcgattcccaatggctgggggacagagtcatcaccaccagcacccgaacctgggccctgcccacctacaacaatcacctctacaagcaaatctccaacagcacatctggaggatcttcaaatgacaacgcctacttcggctacagcaccccctgggggtattttgacttcaacagattccactgccacttctcaccacgtgactggcagcgactcatcaacaacaactggggattccggcctaagcgactcaacttcaagctcttcaacattcaggtcaaagaggttacggacaacaatggagtcaagaccatcgccaataaccttaccagcacggtccaggtcttcacggactcagactatcagctcccgtacgtgctcgggtcggctcacgagggctgcctcccgccgttcccagcggacgttttcatgattcctcagtacgggtatctgacgcttaatgatggaagccaggccgtgggtcgttcgtccttttactgcctggaatatttcccgtcgcaaatgctaagaacgggtaacaacttccagttcagctacgagtttgagaacgtacctttccatagcagctacgctcacagccaaagcctggaccgactaatgaatccactcatcgaccaatacttgtattacttgagtaaaacaattaacggacacgacagcccacacaaaagcggacaaaaccaacagaccttgaagttttcggtagctggtcctagcaacatggctgtccagggaagaaactacatacctggacccagctaccgacaacaacgtgtctcaaccactgtgactcaaaacaacaacagcgaatttgcttggcctggagcttcttcttgggctctcaatggacgtaatagcttgatgaatcctggacctgctatggccagccacaaagaaggagaggaccgtttctttcctttgtctggatctttaatttttggcaaacaaggaactggaagagacaacgtggatgcggacaaagtcatgataaccaacgaagaagaaattaaaactactaacccggtagcaacggagtcctatggacaagtggccacaaaccaccagagtgcccaagcacaggcgcagaccggctgggttcaaaaccaaggaatacttccgggtatggtttggcaggacagagatgtgtacctgcaaggacccatttgggccaaaattcctcacacggacggcaactttcacccttctccgctgatgggagggtttggaatgaagcacccgcctcctcagatcctcatcaaaaacacacctgtacctgcggatcctccaacggccttcaacaaggacaagctgaactctttcatcacccagtattctactggccaagtcagcgtggagatcgagtgggagctgcagaaggaaaacagcaagcgctggaacccggagatccagtacacttccaactattacaagtctaataatgttgaatttgctgttaatactgaaggtgtatatagtgaaccccgccccattggcacgcggtatttaacgaggaacttataa

SEQ ID NO: 985 - protein, 6 aa, synthetic construct
STHASR

SEQ ID NO: 986 - protein, 6 aa, synthetic construct
SQHKSG

SEQ ID NO: 987 - protein, 7 aa, synthetic construct
YTSTLQS

SEQ ID NO: 988 - protein, 8 aa, synthetic construct
LQYDHLLT

SEQ ID NO: 989 - protein, 15 aa, synthetic construct
RASKSVSTSDYSYMH

SEQ ID NO: 990 - protein, 7 aa, synthetic construct
LASNLES

SEQ ID NO: 991 - protein, 9 aa, synthetic construct
QHSRELPFT

SEQ ID NO: 992 - protein, 16 aa, synthetic construct
KSSQSLLYSDGKTFLN

SEQ ID NO: 993 - protein, 7 aa, synthetic construct
LVSKLQS

SEQ ID NO: 994 - protein, 9 aa, synthetic construct
VQGTHFPYT

SEQ ID NO: 995 - protein, 16 aa, synthetic construct
KSSQSLLYSDGKTYLN

SEQ ID NO: 996 - protein, 7 aa, synthetic construct
QVSKLDP

SEQ ID NO: 997 - protein, 9 aa, synthetic construct
LQGTYYPHT

SEQ ID NO: 998 - protein, 8 aa, synthetic construct
LQGTYYPH

SEQ ID NO: 999 - protein, 11 aa, synthetic construct
QASQGTSINLN

SEQ ID NO: 1000 - protein, 7 aa, synthetic construct
GASNLED

SEQ ID NO: 1001 - protein, 7 aa, synthetic construct
LQHTYLP

SEQ ID NO: 1002 - protein, 11 aa, synthetic construct
QASQDTSINLN

SEQ ID NO: 1003 - protein, 7 aa, synthetic construct
GSSNLED

SEQ ID NO: 1004 - protein, 7 aa, synthetic construct
LQHSYLP

SEQ ID NO: 1005 - protein, 16 aa, synthetic construct
RSSQSLVHSNGNTYLH

SEQ ID NO: 1006 - protein, 7 aa, synthetic construct
KVSNRFS

SEQ ID NO: 1007 - protein, 7 aa, synthetic construct
SQSTHVP

SEQ ID NO: 1008 - protein, 15 aa, synthetic construct
  VARIANT 14: note = Any amino acid
WYLQKPGQSPQLLXY

SEQ ID NO: 1009 - protein, 32 aa, synthetic construct
  VARIANT 29: note = Any amino acid
GVPDRFSGSGSGTDFTLKISRVEAEDVGXYYC

SEQ ID NO: 1010 - protein, 10 aa, synthetic construct
FGGGTKVEIK

SEQ ID NO: 1011 - protein, 16 aa, synthetic construct
RSSQTILHSNGNTYLE

SEQ ID NO: 1012 - protein, 16 aa, synthetic construct
KSSQSIVHSNGNTYLE

SEQ ID NO: 1013 - protein, 15 aa, synthetic construct
WYLQKPGQSPQLLVY

SEQ ID NO: 1014 - protein, 7 aa, synthetic construct
KVSKRFS

SEQ ID NO: 1015 - protein, 32 aa, synthetic construct
GVPDRFSGSGSGTDFTLKISRVEAEDVGTYYC

SEQ ID NO: 1016 - protein, 9 aa, synthetic construct
FQGSLVPWA

SEQ ID NO: 1017 - protein, 16 aa, synthetic construct
RSSQSLVHSNQNTYLH

SEQ ID NO: 1018 - protein, 8 aa, synthetic construct
YKVDNRFS

SEQ ID NO: 1019 - protein, 9 aa, synthetic construct
SQSTLVPLT

SEQ ID NO: 1020 - protein, 12 aa, synthetic construct
SESLLHSNGNTY

SEQ ID NO: 1021 - protein, 16 aa, synthetic construct
RSSESLLHSNGNTYLY

SEQ ID NO: 1022 - protein, 6 aa, synthetic construct
GGCTCT

SEQ ID NO: 1023 - protein, 7 aa, synthetic construct
RMSNLAS

SEQ ID NO: 1024 - protein, 6 aa, synthetic construct
YLEYPL

SEQ ID NO: 1025 - protein, 9 aa, synthetic construct
MQYLEYPLT

SEQ ID NO: 1026 - protein, 7 aa, synthetic construct
SQDINRY

SEQ ID NO: 1027 - protein, 11 aa, synthetic construct
KASQDINRYLN

SEQ ID NO: 1028 - skipped

SEQ ID NO: 1029 - protein, 7 aa, synthetic construct
RANRLLD

SEQ ID NO: 1030 - protein, 6 aa, synthetic construct
YDEFPL

SEQ ID NO: 1031 - protein, 9 aa, synthetic construct
LQYDEFPLT

SEQ ID NO: 1032 - protein, 122 aa, synthetic construct
DIVLTQTPLSLPVSLGDPASISCRSSQTIVHSNGNTYLEWYLQKPGQSPKLLIYKVSNRFSGVPDRFSGSGSGTDFTLKISRVEAEDLGVYYCFQGSHVPFTFGSGTKLEIKRADAAPTVST

SEQ ID NO: 1033 - protein, 116 aa, synthetic construct
DIVLTQTPSSLSASLGGKVTITCKASQDINKYIAWYQHKPGKGPRLLIHYTSTLQSGIPSRFSGSGSGRDYSFSISNLEPEDIATYYCLQYDHLLTFGAGTKLELKRADAAPTVST

SEQ ID NO: 1034 - protein, 121 aa, synthetic construct
DIVLTQSPTSLAVSLGQRATISCRASKSVSTSDYSYMHWYQQKPGQPPKLLIYLASNLESGVPARFSGSGSGTDFTLNIHPVEEEDAATYYCQHSRELPFTFGGGTKLEIKRADAAPTVST

SEQ ID NO: 1035 - protein, 122 aa, synthetic construct
DIVLTQTPLTLSVTIGQPASISCKSSQSLLYSDGKTFLNWLLQSPGQSPRLLIYLVSKLQSGVPDRFSGSGSGTDFTLKISRVEAEDLGVYYCVQGTHFPYTFGGGTKLEIKRADAAPTVST

SEQ ID NO: 1036 - protein, 122 aa, synthetic construct
DIVMTQSPLSLSVTIGQPASISCKSSQSLLYSDGKTYLNWLQQRPGQSPKRLVYQVSKLDPGIPDRFSGSGSETDFTLKLSRVEAEDLGVYYCLQGTYYPHTFGGGTKLEIKRADAAPTVST

SEQ ID NO: 1037 - protein, 122 aa, synthetic construct
DIVITQSPLSLSVTIGQPASISCKSSQSLLYSDGKTYLNWLQQRPGQSPKRLVYQVSKLDPGIPDRFSGSGSETDFTLKLSRVEAEDLGVYYCLQGTYYPHTFGGGTKLEIKRADAAPTVST

SEQ ID NO: 1038 - protein, 107 aa, synthetic construct
DVQMIQSPSSLSASLGDIVTMTCQASQGTSINLNWFQQKPGKAPKLLIYGASNLEDGVPSRFSGSRYGTDFTLTISSLEDEDMATYFCLQHTYLPFTFGSGTKLEIK

SEQ ID NO: 1039 - protein, 214 aa, synthetic construct
DVQMIQSPSSLSASLGDIVTMTCQASQGTSINLNWFQQKPGKAPKLLIYGASNLEDGVPSRFSGSRYGTDFTLTISSLEDEDMATYFCLQHTYLPFTFGSGTKLEIKRADAAPTVSIFPPSSEQLTSGGASVVCFLNNFYPKDINVKWKIDGSERQNGVLNSWTDQDSKDSTYSMSSTLTLTKDEYERHNSYTCEATHKTSTSPIVKSFNRNEC

SEQ ID NO: 1040 - DNA, 321 bp, synthetic construct
  source 1..321: mol_type = other DNA
gacgtgcagatgatccagagccccagcagcctgagcgccagcctgggcgacatcgtgaccatgacctgccaggccagccagggcaccagcatcaacctgaactggttccagcagaagcccggcaaggcccccaagctgctgatctacggcgccagcaacctggaggacggcgtgcccagcaggttcagcggcagcaggtacggcaccgacttcaccctgaccatcagcagcctggaggacgaggacatggccacctacttctgcctgcagcacacctacctgcccttcaccttcggcagcggcaccaagctggagatcaag

SEQ ID NO: 1041 - DNA, 321 bp, synthetic construct
  source 1..321: mol_type = other DNA
gacgttcagatgatccagagccccagcagcctgagcgccagcctgggcgacatcgtgaccatgacctgccaggccagccagggcaccagcatcaacctgaactggttccagcagaagcccggcaaggcccccaagctgctgatctacggcgccagcaacctggaggacggcgtgcccagccggttcagcggcagccggtacggcaccgacttcaccctgaccatcagcagcctggaggacgaggacatggccacctacttctgcctgcagcacacctacctgcccttcaccttcggcagcggcaccaagctggagatcaag

SEQ ID NO: 1042 - DNA, 321 bp, synthetic construct
  source 1..321: mol_type = other DNA
gatgtgcagatgatccagagcccttcttccctctccgcctccctgggcgacatcgtgaccatgacctgccaggccagccagggcaccagcatcaacctgaactggttccagcagaagcccgggaaggcccccaagctcctcatctacggcgcctcaaatttggaagatggagtgcccagccgcttctccgggtcccgctatggaacagacttcacactgaccatcagcagcctggaggatgaggacatggccacctacttctgcctgcagcacacatacctgcccttcaccttcggcagcgggaccaagctggagatcaag

SEQ ID NO: 1043 - DNA, 321 bp, synthetic construct
  source 1..321: mol_type = other DNA
gacgtgcagatgatccagagcccctccagcctgagcgcctcgctgggggacatcgtgaccatgacctgccaggcctcccagggcaccagcatcaacctcaactggttccagcagaagcccggcaaggcccccaagctgctgatctacggggccagcaacctggaggacggcgtgcccagccgcttcagcggctcccgctacggcacggacttcacgctgaccatctcctccctggaggacgaggacatggccacctacttctgcctgcagcacacctacctgcccttcaccttcggcagcgggaccaagctggagatcaag

SEQ ID NO: 1044 - DNA, 321 bp, synthetic construct
  source 1..321: mol_type = other DNA
gacgtgcagatgatccagagccccagctccctcagcgcctccctgggggacatcgtgaccatgacctgccaggccagccagggcaccagcatcaacctcaactggttccagcagaagcccggcaaggcccccaagctgctgatctacggggcctccaacctggaggacggcgtgccctcccgcttcagcggcagccgctacggcacggacttcacgctgaccatcagcagcctggaggacgaggacatggccacctacttctgcctgcagcacacctacctgcccttcaccttcgggagcgggaccaagttggagatcaag

SEQ ID NO: 1045 - DNA, 321 bp, synthetic construct
  source 1..321: mol_type = other DNA
gacgtgcagatgatccagagccccagcagcctgagcgcctcgctgggggacatcgtgaccatgacctgccaggcctcccagggcaccagcatcaacctcaactggttccagcagaagcccggcaaggcccccaagctcctcatctacggggccagcaacctggaggacggcgtgccctcccgcttcagcggctcccgctacggcacggacttcacgctgaccatctcctccctggaggacgaggacatggccacctacttctgcctgcagcacacctacctgcccttcaccttcggcagcgggaccaagctggagatcaag

SEQ ID NO: 1046 - DNA, 321 bp, synthetic construct
  source 1..321: mol_type = other DNA
gacgttcagatgatccagtccccctcctccctgtccgcctccctgggcgacatcgtgaccatgacctgccaggcctcccagggcacctccatcaacctgaactggttccagcagaagcccggcaaggcccccaagctgctgatctacggcgcctccaacctggaggacggcgtgccctcccggttctccggctcccggtacggcaccgacttcaccctgaccatctcctccctggaggacgaggacatggccacctacttctgcctgcagcacacctacctgcccttcaccttcggctccggcaccaagctggagatcaag

SEQ ID NO: 1047 - DNA, 321 bp, synthetic construct
  source 1..321: mol_type = other DNA
gacgtgcagatgatccagagcccctcctccctgagcgccagcctgggggacatcgtgaccatgacctgccaggcctcccagggcaccagcatcaacctcaactggttccagcagaagcccggcaaggcccccaagctcctcatctacggggccagcaacctggaggacggcgtgcccagccgcttcagcggctcccgctacggcacggacttcacgctgaccatcagcagcctggaggacgaggacatggccacctacttctgcctgcagcacacctacctgcccttcaccttcggcagcgggaccaagctggagatcaag

SEQ ID NO: 1048 - DNA, 321 bp, synthetic construct
  source 1..321: mol_type = other DNA
gacgttcagatgatccagagccctagcagcctgagcgccagcctgggcgacatcgtgaccatgacctgccaggccagccagggcaccagcatcaacctgaactggttccagcagaagcctggcaaggcccctaagctgctgatctacggcgccagcaacctggaggacggcgtgcctagccgtttcagcggcagccgttacggcaccgacttcaccctgaccatcagcagcctggaggacgaggacatggccacctacttctgcctgcagcacacctacctgcctttcaccttcggcagcggcaccaagctggagatcaag

SEQ ID NO: 1049 - DNA, 321 bp, synthetic construct
  source 1..321: mol_type = other DNA
gacgttcagatgatccagagccctagcagcctgagcgccagcctgggcgacatcgtgaccatgacctgccaggccagccagggcaccagcatcaacctgaactggttccagcagaagcctggcaaggcccctaagctgctgatctacggcgccagcaacctggaggacggcgtgcccagccggttcagcggcagccggtacggcaccgacttcaccctgaccatcagcagcctggaggacgaggacatggccacctacttctgcctgcagcacacctacctgcccttcaccttcggcagcggcaccaagctggagatcaag

SEQ ID NO: 1050 - protein, 214 aa, synthetic construct
DVQMIQSPSSLSASLGDIVTMTCQASQDTSINLNWFQQKPGKAPKLLIYGASNLEDGVPSRFSGSRYGTDFTLTISSLEDEDMATYFCLQHTYLPFTFGSGTKLEIKRADAAPTVSIFPPSSEQLTSGGASVVCFLNNFYPKDINVKWKIDGSERQNGVLNSWTDQDSKDSTYSMSSTLTLTKDEYERHNSYTCEATHKTSTSPIVKSFNRNEC

SEQ ID NO: 1051 - protein, 214 aa, synthetic construct
DVQMIQSPSSLSASLGDIVTMTCQASQGTSINLNWFQQKPGKAPKLLIYGSSNLEDGVPSRFSGSRYGTDFTLTISSLEDEDMATYFCLQHSYLPFTFGSGTKLEIKRADAAPTVSIFPPSSEQLTSGGASVVCFLNNFYPKDINVKWKIDGSERQNGVLNSWTDQDSKDSTYSMSSTLTLTKDEYERHNSYTCEATHKTSTSPIVKSFNRNEC

SEQ ID NO: 1052 - protein, 219 aa, synthetic construct
DVMMTQTPLSLPVSLGDQASISCRSSQSLVHSNGNTYLHWHLQKPGQSPKFLIYKVSNRFSGVPDRFSGSGSGTDFTLKISRVEAEDLGVYFCSQSTHVPFTFGSGTKLEIKRADAAPTVSIFPPSSEQLTSGGASVVCFLNNFYPKDINVKWKIDGSERQNGVLNSWTDQDSKDSTYSMSSTLTLTKDEYERHNSYTCEATHKTSTSPIVKSFNRNEC

SEQ ID NO: 1053 - protein, 219 aa, synthetic construct
DVVMTQTPLSLPVSLGDQASISCRSSQSLVHSNGNTYLHWHLQKPGQSPKFLIYKVSNRFSGVPDRFSGSGSGTDFTLKISRVEAEDLGVYFCSQSTHVPFTFGSGTKLEIKRADAAPTVSIFPPSSEQLTSGGASVVCFLNNFYPKDINVKWKIDGSERQNGVLNSWTDQDSKDSTYSMSSTLTLTKDEYERHNSYTCEATHKTSTSPIVKSFNRNEC

SEQ ID NO: 1054 - protein, 214 aa, synthetic construct
DVQMTQSPSSLSASVGDRVTMTCQASQDTSINLNWFQQKPGKAPKLLIYGASNLETGVPSRFSGSRSGTDFTLTISSLQPEDMATYYCLQHTYLPFTFGSGTKLEIKRTVAAPSVFIFPPSDEQLKSGTASVVCLLNNFYPREAKVQWKVDNALQSGNSQESVTEQDSKDSTYSLSSTLTLSKADYEKHKVYACEVTHQGLSSPVTKSFNRGEC

SEQ ID NO: 1055 - DNA, 336 bp, synthetic construct
  source 1..336: mol_type = other DNA
gatgttttgatgacccaaactccgctctccctggcagtcaatcttggagatcaagcctccctctcttgcagatcgagtcagactattttacatagtaatggaaatacctatttagaatggtatttgcagaaaccaggccagtctccaagactcctgatctacaaagtttctaaacgattttctggggtcccagacaggttcagtggcagtggatcagggacagatttcacactcaagatcagcagagtggaggctgacgatctgggaatttattactgctttcaaggttcacttgttccttgggcgttcggtggaggcaccaagctggaaatcaaa

SEQ ID NO: 1056 - protein, 112 aa, synthetic construct
DVLMTQTPLSLAVNLGDQASLSCRSSQTILHSNGNTYLEWYLQKPGQSPRLLIYKVSKRFSGVPDRFSGSGSGTDFTLKISRVEADDLGIYYCFQGSLVPWAFGGGTKLEIK

SEQ ID NO: 1057 - protein, 23 aa, synthetic construct
  VARIANT 3: note = Any amino acid
DVXMTQSPLSLPVTLGQPASISC

SEQ ID NO: 1058 - DNA, 336 bp, synthetic construct
  source 1..336: mol_type = other DNA
gatgttttgatgacccaaactccactctccctgcctgtcagtcttggagatcaagcctccatctcttgcaaatctagtcagagcattgtacatagtaatggaaacacctatttagaatggtacctgcagaaaccaggccagtctccaaagctcctggtctacaaagtttccaatcgattttctggggtcccagacaggttcagtggcagtggatcagggacagatttcacactcaagatcagcagagtggaggctgaggatctgggaacttattactgctttcaaggttcacttgttccttgggcgttcggtggaggcaccaagctggaaatcaaa

SEQ ID NO: 1059 - DNA, 714 bp, synthetic construct
  source 1..714: mol_type = other DNA
atgaagttgcctgttaggctgttggtgctgatgttctggattcctgcttccagcagtgatgttttgatgacccaaactccactctccctgcctgtcagtcttggagatcaagcctccatctcttgcaaatctagtcagagcattgtacatagtaatggaaacacctatttagaatggtacctgcagaaaccaggccagtctccaaagctcctggtctacaaagtttccaatcgattttctggggtcccagacaggttcagtggcagtggatcagggacagatttcacactcaagatcagcagagtggaggctgaggatctgggaacttattactgctttcaaggttcacttgttccttgggcgttcggtggaggcaccaagctggaaatcaaacgggctgatgctgcaccaactgtatccatcttcccaccatccagtgagcagttaacatctggaggtgcctcagtcgtgtgcttcttgaacaacttctaccccaaagacatcaatgtcaagtggaagattgatggcagtgaacgacaaaatggcgtcctgaacagttggactgatcaggacagcaaagacagcacctacagcatgagcagcaccctcacgttgaccaaggacgagtatgaacgacataacagctatacctgtgaggccactcacaagacatcaacttcacccattgtcaagagcttcaacaggaatgagtgt

SEQ ID NO: 1060 - protein, 112 aa, synthetic construct
DVLMTQTPLSLPVSLGDQASISCKSSQSIVHSNGNTYLEWYLQKPGQSPKLLVYKVSNRFSGVPDRFSGSGSGTDFTLKISRVEAEDLGTYYCFQGSLVPWAFGGGTKLEIK

SEQ ID NO: 1061 - DNA, 336 bp, synthetic construct
  source 1..336: mol_type = other DNA
gatgttttgatgacccaaagcccactctccctgcctgtcacccttggacagcccgcctccatctcttgcaaatctagtcagagcattgtacatagtaatggaaacacctatttagaatggtacctgcagaaaccaggccagtctccacagctcctggtctacaaagtttccaatcgattttctggggtcccagacagattcagtggcagtggatcagggacagatttcacactcaagatcagcagagtggaggctgaggatgtgggaacttattactgctttcaaggctcacttgttccttgggcgttcggtggaggcaccaaggtggaaatcaaa

SEQ ID NO: 1062 - protein, 112 aa, synthetic construct
DVLMTQSPLSLPVTLGQPASISCKSSQSIVHSNGNTYLEWYLQKPGQSPQLLVYKVSNRFSGVPDRFSGSGSGTDFTLKISRVEAEDVGTYYCFQGSLVPWAFGGGTKVEIK

SEQ ID NO: 1063 - DNA, 336 bp, synthetic construct
  source 1..336: mol_type = other DNA
gatgttgtgatgacccaaagcccactctccctgcctgtcacccttggacagcccgcctccatctcttgcaaatctagtcagagcattgtacatagtaatggaaacacctatttagaatggtacctgcagaaaccaggccagtctccacagctcctggtctacaaagtttccaatcgattttctggggtcccagacagattcagtggcagtggatcagggacagatttcacactcaagatcagcagagtggaggctgaggatgtgggaacttattactgctttcaaggctcacttgttccttgggcgttcggtggaggcaccaaggtggaaatcaaa

SEQ ID NO: 1064 - protein, 112 aa, synthetic construct
DVVMTQSPLSLPVTLGQPASISCKSSQSIVHSNGNTYLEWYLQKPGQSPQLLVYKVSNRFSGVPDRFSGSGSGTDFTLKISRVEAEDVGTYYCFQGSLVPWAFGGGTKVEIK

SEQ ID NO: 1065 - DNA, 336 bp, synthetic construct
  source 1..336: mol_type = other DNA
gatgttgtgatgacccaaagcccactctccctgcctgtcacccttggacagcccgcctccatctcttgcaaatctagtcagagcattgtacatagtaatggaaacacctatttagaatggtacctgcagaaaccaggccagtctccacagctcctggtctacaaagtttccaatcgattttctggggtcccagacagattcagtggcagtggatcagggacagatttcacactcaagatcagcagagtggaggctgaggatgtgggagtgtattactgctttcaaggctcacttgttccttgggcgttcggtggaggcaccaaggtggaaatcaaa

SEQ ID NO: 1066 - protein, 112 aa, synthetic construct
DVVMTQSPLSLPVTLGQPASISCKSSQSIVHSNGNTYLEWYLQKPGQSPQLLVYKVSNRFSGVPDRFSGSGSGTDFTLKISRVEAEDVGVYYCFQGSLVPWAFGGGTKVEIK

SEQ ID NO: 1067 - DNA, 336 bp, synthetic construct
  source 1..336: mol_type = other DNA
gatgttgtgatgacccaaagcccactctccctgcctgtcacccttggacagcccgcctccatctcttgcaaatctagtcagagcattgtacatagtaatggaaacacctatttagaatggtacctgcagaaaccaggccagtctccacagctcctgatctacaaagtttccaatcgattttctggggtcccagacagattcagtggcagtggatcagggacagatttcacactcaagatcagcagagtggaggctgaggatgtgggagtgtattactgctttcaaggctcacttgttccttgggcgttcggtggaggcaccaaggtggaaatcaaa

SEQ ID NO: 1068 - protein, 112 aa, synthetic construct
DVVMTQSPLSLPVTLGQPASISCKSSQSIVHSNGNTYLEWYLQKPGQSPQLLIYKVSNRFSGVPDRFSGSGSGTDFTLKISRVEAEDVGVYYCFQGSLVPWAFGGGTKVEIK

SEQ ID NO: 1069 - DNA, 714 bp, synthetic construct
  source 1..714: mol_type = other DNA
atgaagttgcctgttaggctgttggtgctgatgttctggattcctgcttccagcagtgatgttgtgatgacccaaactccactctccctgcctgtcagtcttggagatcaagcctccatctcttgcagatctagtcagagccttgtacacagtaatggaaacacctatttacattggtacctgcagaagccaggccagtctccaaagctcctgatctacaaagtttccaaccgattttctggggtcccagacaggttcagtggcagtggatcagggacagatttcacactcaagatcagcagagtggaggctgaggatctgggagtttatttctgctctcaaagtacacatgttccgctcacgttcggtgctgggaccaagctggagctgaaacgggctgatgctgcaccaactgtatccatcttcccaccatccagtgagcagttaacatctggaggtgcctcagtcgtgtgcttcttgaacaacttctaccccaaagacatcaatgtcaagtggaagattgatggcagtgaacgacaaaatggcgtcctgaacagttggactgatcaggacagcaaagacagcacctacagcatgagcagcaccctcacgttgaccaaggacgagtatgaacgacataacagctatacctgtgaggccactcacaagacatcaacttcacccattgtcaagagcttcaacaggaatgagtgt

SEQ ID NO: 1070 - DNA, 717 bp, synthetic construct
  source 1..717: mol_type = other DNA
atgaagttgcctgttaggctgttggtgctgatgttctggattcctgcttccagcagtgatgttgtgatgacccaaactccactctccctgcctgtcagtcttggagatcaagcctccatctcttgcagatctagtcagagccttgtacacagtaatggaaacacctatttacattggtacctgcagaagccaggccagtctccaaagctcctgatctacaaagtttccaaccgattttctggggtcccagacaggttcagtggcagtggatcagggacagatttcacactcaagatcagcagagtggaggctgaggatctgggagtttatttctgctctcaaagtacacatgttccgctcacgttcggtgctgggaccaagctggagctgaaacgggctgatgctgcaccaactgtatccatcttcccaccatccagtgagcagttaacatctggaggtgcctcagtcgtgtgcttcttgaacaacttctaccccaaagacatcaatgtcaagtggaagattgatggcagtgaacgacaaaatggcgtcctgaacagttggactgatcaggacagcaaagacagcacctacagcatgagcagcaccctcacgttgaccaaggacgagtatgaacgacataacagctatacctgtgaggccactcacaagacatcaacttcacccattgtcaagagcttcaacaggaatgagtgttag

SEQ ID NO: 1071 - DNA, 84 bp, synthetic construct
  source 1..84: mol_type = other DNA
atggcgacgggttcaagaacttccctacttcttgcatttggcctgctttgtttgccgtggttacaggagggctcggcagctgcc

SEQ ID NO: 1072 - DNA, 93 bp, synthetic construct
  source 1..93: mol_type = other DNA
gccgccaccatggcgacgggttcaagaacttccctacttcttgcatttggcctgctttgtttgccgtggttacaggagggctcggcagctgcc

SEQ ID NO: 1073 - DNA, 96 bp, synthetic construct
  source 1..96: mol_type = other DNA
gccgccaccatgggggtgcacgaatgtcctgcctggctgtggcttctcctgtccctgctgtcgctccctctgggcctcccagtcctgggcgctgcc

SEQ ID NO: 1074 - DNA, 66 bp, synthetic construct
  source 1..66: mol_type = other DNA
gccgccaccatgggagtcaaagttctgtttgccctgatctgcatcgctgtggccgaggccgctgcc

SEQ ID NO: 1075 - DNA, 72 bp, synthetic construct
  source 1..72: mol_type = other DNA
gccgccaccatgaaacacctgtggttcttcctcctgctggtggcagctcccagatgggtcctgtccgctgcc

SEQ ID NO: 1076 - DNA, 93 bp, synthetic construct
  source 1..93: mol_type = other DNA
gccgccaccatggacctcctgcacaagaacatgaaacacctgtggttcttcctcctcctggtggcagctcccagatgggtgctgtccgctgcc

SEQ ID NO: 1077 - DNA, 69 bp, synthetic construct
  source 1..69: mol_type = other DNA
gccgccaccatggctttcctctggctcctctcctgctgggccctcctgggtaccaccttcggcgctgcc

SEQ ID NO: 1078 - DNA, 81 bp, synthetic construct
  source 1..81: mol_type = other DNA
gccgccaccatgccccccaagaagtgcctgctgctgctgctgaccctgctgctgctgatctccaccaccttcggcgctgcc

SEQ ID NO: 1079 - DNA, 12 bp, synthetic construct
  source 1..12: mol_type = other DNA
gccgccaccatg

SEQ ID NO: 1080 - DNA, 81 bp, synthetic construct
  source 1..81: mol_type = other DNA
gccgccaccatggacatgagggtccctgctcagctcctggggctcctgctgctctggctctcaggtgccagatgtgctgcc

SEQ ID NO: 1081 - DNA, 66 bp, synthetic construct
  source 1..66: mol_type = other DNA
gccgccaccatggaaatcaaggtgctgtttgccctcatctgtattgctgttgctgaggcagctgcc

SEQ ID NO: 1082 - DNA, 78 bp, synthetic construct
  source 1..78: mol_type = other DNA
gccgccaccatggagacagacacactcctgctatgggtactgctgctctgggttccaggttccactggtgacgctgcc

SEQ ID NO: 1083 - DNA, 57 bp, synthetic construct
  source 1..57: mol_type = other DNA
atgaacttcgggctcagcttgattttccttgtccttgttttaaaaggtgtccagtgt

SEQ ID NO: 1084 - DNA, 57 bp, synthetic construct
  source 1..57: mol_type = other DNA
atgggatggagctggatctttctctttctcctgtcaggaactacaggtgtcctctct

SEQ ID NO: 1085 - DNA, 57 bp, synthetic construct; identical to SEQ ID NO: 169
  source 1..57: mol_type = other DNA

SEQ ID NO: 1086 - DNA, 411 bp, synthetic construct
  source 1..411: mol_type = other DNA
atgaacttcgggctcagcttgattttccttgtccttgttttaaaaggtgtccagtgtgaggtgaagctggtggagagcggcggcgacctggtgaagcctggcggcagcctgaagctgagctgcgccgccagcggcttcaccttcagcagctacgccatgagctgggtgagacagaaccctgagaagagactggagtgggtggccagcatcagcaagggcggcaacacctactaccctaacagcgtgaagggcagattcaccatcagcagagacaacgccagaaacatcctgtacctgcagatgagcagcctgagaagcgaggacaccgccctgtactactgcgccagaggctggggcgactacggctggttcgcctactggggccaggtgaccctggtgaccgtgagcgcc

SEQ ID NO: 1087 - DNA, 657 bp, synthetic construct
  source 1..657: mol_type = other DNA
gaaattgtgttgacgcagtctccaggcaccctgtctttgtctccaggggaaagagccaccctctcctgcagatctagtcagagccttgtacacagtaatcagaacacctatttacattggtaccagcagaaacctggccaggctcccaggctcctcatctataaagttgacaaccgattttctggcatcccagacaggttcagtggcagtgggtctgggacagacttcactctcaccatcagcagactggagcctgaagattttgcagtgtattactgttctcaaagtacactggttccgctcacgttcggcggagggaccaaggtggagatcaaacggaccgtggctgcaccatctgtcttcatcttcccgccatctgatgagcagttgaaatctggaactgcctctgttgtgtgcctgctgaataacttctatcccagagaggccaaagtacagtggaaggtggataacgccctccaatcgggtaactcccaggagagtgtcacagagcaggacagcaaggacagcacctacagcctcagcagcaccctgacgctgagcaaagcagactacgagaaacacaaagtctacgcctgcgaagtcacccatcagggcctgagctcgcccgtcacaaagagcttcaacaggggagagtgc

SEQ ID NO: 1088 - protein, 238 aa, synthetic construct
MKLPVRLLVLMFWIPASSSDVVMTQTPLSLPVSLGDQASISCRSSQSLVHSNGNTYLHWYLQKPGQSPKLLIYKVSNRFSGVPDRFSGSGSGTDFTLKISRVEAEDLGVYFCSQSTHVPLTFGAGTKLELKRADAAPTVSIFPPSSEQLTSGGASVVCFLNNFYPKDINVKWKIDGSERQNGVLNSWTDQDSKDSTYSMSSTLTLTKDEYERHNSYTCEATHKTSTSPIVKSFNRNEC

SEQ ID NO: 1089 - protein, 219 aa, synthetic construct
EIVLTQSPGTLSLSPGERATLSCRSSQSLVHSNQNTYLHWYQQKPGQAPRLLIYKVDNRFSGIPDRFSGSGSGTDFTLTISRLEPEDFAVYYCSQSTLVPLTFGGGTKVEIKRTVAAPSVFIFPPSDEQLKSGTASVVCLLNNFYPREAKVQWKVDNALQSGNSQESVTEQDSKDSTYSLSSTLTLSKADYEKHKVYACEVTHQGLSSPVTKSFNRGEC

SEQ ID NO: 1090 - protein, 112 aa, synthetic construct
EIVLTQSPGTLSLSPGERATLSCRSSQSLVHSNQNTYLHWYQQKPGQAPRLLIYKVDNRFSGIPDRFSGSGSGTDFTLTISRLEPEDFAVYYCSQSTLVPLTFGGGTKVEIK

SEQ ID NO: 1091 - DNA, 339 bp, synthetic construct
  source 1..339: mol_type = other DNA
gatgttgtgatgacccagactccactcactttgtcggttaccattggacaaccagcctccatctcttgcaagtcaagtcagagcctcttagatagtgatggaaagacatatttgaattggttgttacagaggccaggccagtctccaaagcgcctaatctatctggtgtctaaactggactctggagtccccgacagattcactggcagtggatcagggacagatttcacactgaaaattagcagagtggaggctgaggatttgggagtttattattgctggcaaggtacacattttcctcggacgttcggtggaggcaccaagctggaaatcaaacgg

SEQ ID NO: 1092 - DNA, 339 bp, synthetic construct
  source 1..339: mol_type = other DNA
gatgttgtgatgacccagactccactcactttgtcggttaccattggacaaccagcctccatctcttgcaagtcaagtcagagcctcttagatagtgatggaaagacatatttgaattggttgttacagaggccaggccagtctccaaagcgcctaatctatctggtgtctaaactggactctggagtccctgacagattcactggcagtggatcagggacagatttcacactgaaaattagcagagtggaggctgaggatttgggagtttattattgctggcaaggtacacattttcctcggacgttcggtggaggcaccaagctggaaatcaaacgg

SEQ ID NO: 1093 - DNA, 396 bp, synthetic construct
  source 1..396: mol_type = other DNA
atgagtcctgcccagttcctgtttctgttagtgctctggattcgggaaaccaacggtgatgttgtgatgacccagactccactcactttgtcggttaccattggacaaccagcctccatctcttgcaagtcaagtcagagcctcttagatagtgatggaaagacatatttgaattggttgttacagaggccaggccagtctccaaagcgcctaatctatctggtgtctaaactggactctggagtccccgacagattcactggcagtggatcagggacagatttcacactgaaaattagcagagtggaggctgaggatttgggagtttattattgctggcaaggtacacattttcctcggacgttcggtggaggcaccaagctggaaatcaaacgg

SEQ ID NO: 1094 - DNA, 657 bp, synthetic construct
  source 1..657: mol_type = other DNA
gatgttgtgatgacccagactccactcactttgtcggttaccattggacaaccagcctccatctcttgcaagtcaagtcagagcctcttagatagtgatggaaagacatatttgaattggttgttacagaggccaggccagtctccaaagcgcctaatctatctggtgtctaaactggactctggagtccctgacagattcactggcagtggatcagggacagatttcacactgaaaattagcagagtggaggctgaggatttgggagtttattattgctggcaaggtacacattttcctcggacgttcggtggaggcaccaagctggaaatcaaacgggctgatgctgcaccaactgtatccatcttcccaccatccagtgagcagttaacatctggaggtgcctcagtcgtgtgcttcttgaacaacttctaccccaaagacatcaatgtcaagtggaagattgatggcagtgaacgacaaaatggcgtcctgaacagttggactgatcaggacagcaaagacagcacctacagcatgagcagcaccctcacgttgaccaaggacgagtatgaacgacataacagctatacctgtgaggccactcacaagacatcaacttcacccattgtcaagagcttcaacaggaatgagtgt

SEQ ID NO: 1095 - DNA, 660 bp, synthetic construct
  source 1..660: mol_type = other DNA
gatgttgtgatgacccagactccactcactttgtcggttaccattggacaaccagcctccatctcttgcaagtcaagtcagagcctcttagatagtgatggaaagacatatttgaattggttgttacagaggccaggccagtctccaaagcgcctaatctatctggtgtctaaactggactctggagtccctgacagattcactggcagtggatcagggacagatttcacactgaaaattagcagagtggaggctgaggatttgggagtttattattgctggcaaggtacacattttcctcggacgttcggtggaggcaccaagctggaaatcaaacgggctgatgctgcaccaactgtatccatcttcccaccatccagtgagcagttaacatctggaggtgcctcagtcgtgtgcttcttgaacaacttctaccccaaagacatcaatgtcaagtggaagattgatggcagtgaacgacaaaatggcgtcctgaacagttggactgatcaggacagcaaagacagcacctacagcatgagcagcaccctcacgttgaccaaggacgagtatgaacgacataacagctatacctgtgaggccactcacaagacatcaacttcacccattgtcaagagcttcaacaggaatgagtgttag

SEQ ID NO: 1096 - DNA, 678 bp, synthetic construct
  source 1..678: mol_type = other DNA
gatgttgtgatgacccagactccactcactttgtcggttaccattggacaaccagcctccatctcttgcaagtcaagtcagagcctcttagatagtgatggaaagacatatttgaattggttgttacagaggccaggccagtctccaaagcgcctaatctatctggtgtctaaactggactctggagtccctgacagattcactggcagtggatcagggacagatttcacactgaaaattagcagagtggaggctgaggatttgggagtttattattgctggcaaggtacacattttcctcggacgttcggtggaggcaccaagctggaaatcaaacgggctgatgctgcaccaactgtatccatcttcccaccatccagtgagcagttaacatctggaggtgcctcagtcgtgtgcttcttgaacaacttctaccccaaagacatcaatgtcaagtggaagattgatggcagtgaacgacaaaatggcgtcctgaacagttggactgatcaggacagcaaagacagcacctacagcatgagcagcaccctcacgttgaccaaggacgagtatgaacgacataacagctatacctgtgaggccactcacaagacatcaacttcacccattgtcaagagcttcaacaggaatgagtgtagcgagaaggacgagctgtag

SEQ ID NO: 1097 - DNA, 714 bp, synthetic construct
  source 1..714: mol_type = other DNA
atgagtcctgcccagttcctgtttctgttagtgctctggattcgggaaaccaacggtgatgttgtgatgacccagactccactcactttgtcggttaccattggacaaccagcctccatctcttgcaagtcaagtcagagcctcttagatagtgatggaaagacatatttgaattggttgttacagaggccaggccagtctccaaagcgcctaatctatctggtgtctaaactggactctggagtccctgacagattcactggcagtggatcagggacagatttcacactgaaaattagcagagtggaggctgaggatttgggagtttattattgctggcaaggtacacattttcctcggacgttcggtggaggcaccaagctggaaatcaaacgggctgatgctgcaccaactgtatccatcttcccaccatccagtgagcagttaacatctggaggtgcctcagtcgtgtgcttcttgaacaacttctaccccaaagacatcaatgtcaagtggaagattgatggcagtgaacgacaaaatggcgtcctgaacagttggactgatcaggacagcaaagacagcacctacagcatgagcagcaccctcacgttgaccaaggacgagtatgaacgacataacagctatacctgtgaggccactcacaagacatcaacttcacccattgtcaagagcttcaacaggaatgagtgt

SEQ ID NO: 1098 - DNA, 720 bp, synthetic construct
  source 1..720: mol_type = other DNA
atgatgagtcctgcccagttcctgtttctgttagtgctctggattcgggaaaccaacggtgatgttgtgatgacccagactccactcactttgtcggttaccattggacaaccagcctccatctcttgcaagtcaagtcagagcctcttagatagtgatggaaagacatatttgaattggttgttacagaggccaggccagtctccaaagcgcctaatctatctggtgtctaaactggactctggagtccctgacagattcactggcagtggatcagggacagatttcacactgaaaattagcagagtggaggctgaggatttgggagtttattattgctggcaaggtacacattttcctcggacgttcggtggaggcaccaagctggaaatcaaacgggctgatgctgcaccaactgtatccatcttcccaccatccagtgagcagttaacatctggaggtgcctcagtcgtgtgcttcttgaacaacttctaccccaaagacatcaatgtcaagtggaagattgatggcagtgaacgacaaaatggcgtcctgaacagttggactgatcaggacagcaaagacagcacctacagcatgagcagcaccctcacgttgaccaaggacgagtatgaacgacataacagctatacctgtgaggccactcacaagacatcaacttcacccattgtcaagagcttcaacaggaatgagtgttag

SEQ ID NO: 1099 - protein, 239 aa, synthetic construct
MMSPAQFLFLLVLWIRETNGDVVMTQTPLTLSVTIGQPASISCKSSQSLLDSDGKTYLNWLLQRPGQSPKRLIYLVSKLDSGVPDRFTGSGSGTDFTLKISRVEAEDLGVYYCWQGTHFPRTFGGGTKLEIKRADAAPTVSIFPPSSEQLTSGGASVVCFLNNFYPKDINVKWKIDGSERQNGVLNSWTDQDSKDSTYSMSSTLTLTKDEYERHNSYTCEATHKTSTSPIVKSFNRNEC

SEQ ID NO: 1100 - DNA, 732 bp, synthetic construct
  source 1..732: mol_type = other DNA
gccgccaccatgggatggagctggatctttctctttctcctgtcaggaactacaggtgtcctctctgctgccgatgttgtgatgacccagactccactcactttgtcggttaccattggacaaccagcctccatctcttgcaagtcaagtcagagcctcttagatagtgatggaaagacatatttgaattggttgttacagaggccaggccagtctccaaagcgcctaatctatctggtgtctaaactggactctggagtccctgacagattcactggcagtggatcagggacagatttcacactgaaaattagcagagtggaggctgaggatttgggagtttattattgctggcaaggtacacattttcctcggacgttcggtggaggcaccaagctggaaatcaaacgggctgatgctgcaccaactgtatccatcttcccaccatccagtgagcagttaacatctggaggtgcctcagtcgtgtgcttcttgaacaacttctaccccaaagacatcaatgtcaagtggaagattgatggcagtgaacgacaaaatggcgtcctgaacagttggactgatcaggacagcaaagacagcacctacagcatgagcagcaccctcacgttgaccaaggacgagtatgaacgacataacagctatacctgtgaggccactcacaagacatcaacttcacccattgtcaagagcttcaacaggaatgagtgttag

SEQ ID NO: 1101 - DNA, 747 bp, synthetic construct
  source 1..747: mol_type = other DNA
atgatgagtcctgcccagttcctgtttctgttagtgctctggattcgggaaaccaacggtgatgttgtgatgacccagactccactcactttgtcggttaccattggacaaccagcctccatctcttgcaagtcaagtcagagcctcttagatagtgatggaaagacatatttgaattggttgttacagaggccaggccagtctccaaagcgcctaatctatctggtgtctaaactggactctggagtccctgacagattcactggcagtggatcagggacagatttcacactgaaaattagcagagtggaggctgaggatttgggagtttattattgctggcaaggtacacattttcctcggacgttcggtggaggcaccaagctggaaatcaaacgggctgatgctgcaccaactgtatccatcttcccaccatccagtgagcagttaacatctggaggtgcctcagtcgtgtgcttcttgaacaacttctaccccaaagacatcaatgtcaagtggaagattgatggcagtgaacgacaaaatggcgtcctgaacagttggactgatcaggacagcaaagacagcacctacagcatgagcagcaccctcacgttgaccaaggacgagtatgaacgacataacagctatacctgtgaggccactcacaagacatcaacttcacccattgtcaagagcttcaacaggaatgagtgttacccatacgatgttccagattacgcttag

SEQ ID NO: 1102 - DNA, 336 bp, synthetic construct
  source 1..336: mol_type = other DNA
gatattgtgatgactcaggctgcaccctctgtacctgtcactcctggagagtcagtttccatctcctgcaggtctagtgagagtctcctgcatagtaatggcaacacttacttgtattggttcctgcagaggccaggccagtctcctcagctcctgatatatcggatgtccaaccttgcctcaggagtcccagacaggttcagtggcagtgggtcaggaactgctttcacactgagaatcagtagagtggaggctgaggatgtgggtgtttattactgtatgcaatatctagaatatccgctcacgttcggtgctgggaccaagctggagctgaaa

SEQ ID NO: 1103 - protein, 112 aa, synthetic construct
DIVMTQAAPSVPVTPGESVSISCRSSESLLHSNGNTYLYWFLQRPGQSPQLLIYRMSNLASGVPDRFSGSGSGTAFTLRISRVEAEDVGVYYCMQYLEYPLTFGAGTKLELK

SEQ ID NO: 1104 - DNA, 321 bp, synthetic construct
  source 1..321: mol_type = other DNA
gacatcaagatgacccagtctccatcttccatgtatgcatctctaggagagagagtcactatcacttgcaaggcgagtcaggacattaataggtatttaaactggttccagcagaaaccagggaaatctcctaagaccctgatctatcgtgcaaacagattgctagatggggtcccatcaaggttcagtggcagtggatctgggcaagattactctctcaccatcagcagcctggattatgaagatatgggaatttattattgtctacagtatgatgagtttccgctcacgttcggtgatgggaccaagctggagctgaaa

SEQ ID NO: 1105 - protein, 107 aa, synthetic construct
DIKMTQSPSSMYASLGERVTITCKASQDINRYLNWFQQKPGKSPKTLIYRANRLLDGVPSRFSGSGSGQDYSLTISSLDYEDMGIYYCLQYDEFPLTFGDGTKLELK

SEQ ID NO: 1106 - DNA, 321 bp, synthetic construct
  source 1..321: mol_type = other DNA
gatattaaaatgacccagagcccgagcagcatgtatgcgagcctgggcgaacgcgtgaccattacctgcaaagcgagccaggatattaaccgctatctgaactggtttcagcagaaaccgggcaaaagcccgaaaaccctgatttatcgcgcgaaccgcctgctggatggcgtgccgagccgctttagcggcagcggcagcggccaggattatagcctgaccattagcagcctggattatgaagatatgggcatttattattgcctgcagtatgatgaatttccgctgacctttggcgatggcaccaaactggaactgaaa

SEQ ID NO: 1107 - DNA, 321 bp, synthetic construct
  source 1..321: mol_type = other DNA
gatatcaagatgacccagagccccagctccatgtatgccagcctgggggagcgggtgaccatcacctgcaaggcctcccaggacatcaaccgctacctgaactggttccagcagaagccaggcaagtcccccaagaccctcatctatcgggccaaccggctgctggatggagtgccctcccgcttctccggcagtggcagcggccaggattacagcctcaccatttcttccctggactatgaggacatgggcatctactactgcctgcagtatgatgagttccccctgacctttggagatggcaccaagctggagctgaag

SEQ ID NO: 1108 - DNA, 321 bp, synthetic construct
  source 1..321: mol_type = other DNA
gacatcaagatgacccagagccccagcagcatgtacgccagcctgggcgagagggtgaccatcacctgcaaggccagccaggacatcaacaggtacctgaactggttccagcagaagcccggcaagagccccaagaccctgatctacagggccaacaggctgctggacggcgtgcccagcaggttcagcggcagcggcagcggccaggactacagcctgaccatcagcagcctggactacgaggacatgggcatctactactgcctgcagtacgacgagttccccctgaccttcggcgacggcaccaagctggagctgaag

SEQ ID NO: 1109 - DNA, 321 bp, synthetic construct
  source 1..321: mol_type = other DNA
gacatcaagatgacccagagcccttcctccatgtatgcctccctgggggagcgggtgaccatcacctgcaaggccagccaggatatcaaccgctacctgaactggttccagcagaagccaggcaagagccccaagaccctcatctatcgggccaaccggctgctggatggagtgcccagccgcttctccggcagcggcagtggccaggactacagcctcaccatttccagcctggactatgaggacatgggcatctactactgcctgcagtatgatgagttccccctgacctttggagatggcaccaagctggagctgaag

SEQ ID NO: 1110 - DNA, 321 bp, synthetic construct
  source 1..321: mol_type = other DNA
gacatcaagatgacccagtcccccagctccatgtacgcctctctgggagagcgggtgaccatcacatgcaaggcttctcaggatatcaaccgctacctgaactggttccagcagaagcccggaaagagccctaagaccctgatctacagggccaacagactgctggacggcgtgccaagcaggttttccggctctggaagcggccaggattactccctgacaatctctagcctggactacgaggatatgggcatctactactgtctgcagtacgacgagttccccctgacctttggagatggcacaaagctggagctgaag

SEQ ID NO: 1111 - DNA, 321 bp, synthetic construct
  source 1..321: mol_type = other DNA
gacatcaagatgacccagagcccttcctccatgtatgcctccctgggggagcgggtgaccatcacctgcaaggccagccaggatatcaaccgctacctgaactggttccagcagaagcccggcaagagccccaagaccctcatctatcgggccaaccggctgctggatggagtgcccagccgcttctccggcagcggcagtggccaggactacagcctgaccatttcttctctggactatgaggacatgggcatctactactgcctgcagtatgatgagttccccctgacatttggagatggcaccaagctggagctgaag

SEQ ID NO: 1112 - DNA, 321 bp, synthetic construct
  source 1..321: mol_type = other DNA
cgggctgatgctgcaccaactgtatccatcttcccaccatccagtgagcagttaacatctggaggtgcctcagtcgtgtgcttcttgaacaacttctaccccaaagacatcaatgtcaagtggaagattgatggcagtgaacgacaaaatgacatcaagatgacccagagcccttcctccatgtatgcctccctgggggagcgggtgacaatcacctgcaaggccagccaggatatcaaccgctacctgaactggttccagcagaagccaggcaagagccccaagaccctcatctatagagccaaccggctgctggacggc

SEQ ID NO: 1113 - DNA, 321 bp, synthetic construct
  source 1..321: mol_type = other DNA
gacatcaagatgacccagagcccttcttccatgtatgcttctttaggagaaagagtgacaatcacctgcaaggccagccaggatatcaaccgctacctgaactggttccagcagaagccaggaaaatctcccaagaccctgatttatagagccaacagactgctggacggcgtgcccagccgcttcagtggatctggaagtggccaggactacagcctgaccatctcttctctggattatgaagacatgggcatctactactgcctgcagtatgatgaatttcctttaacatttggagatggcaccaagctggagctgaag

SEQ ID NO: 1114 - DNA, 321 bp, synthetic construct
  source 1..321: mol_type = other DNA
gatatcaagatgacccagagcccttcctccatgtatgcctccctgggggagcgggtgaccatcacctgcaaggccagccaggacatcaaccgctacctgaactggttccagcagaagcccggcaagagccccaagaccctcatctatcgggccaaccggctgctggatggagtgcccagccgcttctccggcagcggcagtggccaggattacagcctcaccatttccagcctggactatgaggacatgggcatctactactgcctgcagtatgatgagttccccctgacctttggagatggcaccaagctggagctgaag

SEQ ID NO: 1115 - DNA, 321 bp, synthetic construct
  source 1..321: mol_type = other DNA
gacatcaagatgacccagagccctagcagcatgtacgccagcctgggcgagagagtgaccatcacctgcaaggccagccaggacatcaacagatacctgaactggttccagcagaagcctggcaagagccctaagaccctgatctacagagccaacagactgctggacggcgtgcctagcagattcagcggcagcggcagcggccaggactacagcctgaccatcagcagcctggactacgaggacatgggcatctactactgcctgcagtacgacgagttccctctgaccttcggcgacggcaccaagctggagctgaag

SEQ ID NO: 1116 - protein, 23 aa, synthetic construct
DVLMTQSPLSLPVTLGQPASISC

SEQ ID NO: 1117 - protein, 18 aa, synthetic construct
  VARIANT 9: note = Any amino acid
  VARIANT 12: note = Any amino acid
RSGYSSPGXPGXPGSRSR

SEQ ID NO: 1118 - protein, 18 aa, synthetic construct
  VARIANT 9: note = Any amino acid
  VARIANT 12: note = Any amino acid
  VARIANT 15: note = Any amino acid
RSGYSSPGXPGXPGXRSR

SEQ ID NO: 1119 - DNA, 2168 bp, synthetic construct
  source 1..2168: mol_type = other DNA
gaggagccaccatggaatggacctgggtctttctcttcctcctgtcagtaactgcaggtgtccactcccaggttcagctgcagcagtctggagctgagctgatgaagcctggggcctcagtgaagatatcctgcaaggctactggctacacattcagtaactactggatagagtgggtaaagcagaggcctggacatggccttgagtggattggagagattttacctggaagtgatagtattaagtacaatgagaatttcaagggcaaggccacattcactgcagatacatcctccaacacagcctacatgcaactcagcagcctgacatctgaggactctgccgtctattactgtgcaagaagggggaactacccagactactggggccaaggcaccactctcacagtctcctcagccaaaacgacacccccatctgtctatccactggcccctggatctgctgcccaaactaactccatggtgaccctgggatgcctggtcaagggctatttccctgagccagtgacagtgacctggaactctggatccctgtccagcggtgtgcacaccttcccagctgtcctgcagtctgacctctacactctgagcagctcagtgactgtcccctccagcacctggcccagcgagaccgtcacctgcaacgttgcccacccggccagcagcaccaaggtggacaagaaaattgtgcccagggattgtggttgtaagccttgcatatgtacagtcccagaagtatcatctgtcttcatcttccccccaaagcccaaggatgtgctcaccattactctgactcctaaggtcacgtgtgttgtggtagacatcagcaaggatgatcccgaggtccagttcagctggtttgtagatgatgtggaggtgcacacagctcagacgcaaccccgggaggagcagttcaacagcactttccgctcagtcagtgaacttcccatcatgcaccaggactggctcaatggcaaggagttcaaatgcagggtcaacagtgcagctttccctgcccccatcgagaaaaccatctccaaaaccaaaggcagaccgaaggctccacaggtgtacaccattccacctcccaaggagcagatggccaaggataaagtcagtctgacctgcatgataacagacttcttccctgaagacattactgtggagtggcagtggaatgggcagccagcggagaactacaagaacactcagcccatcatggacacagatggctcttacttcgtctacagcaagctcaatgtgcagaagagcaactgggaggcaggaaatactttcacctgctctgtgttacatgagggcctgcacaaccaccatactgagaagagcctctcccactctcctggtagaaagaggcgagagggcagaggaagtcttctaacatgcggtgacgtggaggagaatcccggccctatgaagttgcctgttaggctgttggtgctgatgttctggattcctgcttccagcagtgatgttgtgatgacccaaactccactctccctgcctgtcagtcttggagatcaagcctccatctcttgcagatctagtcagagccttgtacacagtaatggaaacacctatttacattggtacctgcagaagccaggccagtctccaaagctcctgatctacaaagtttccaaccgattttctggggtcccagacaggttcagtggcagtggatcagggacagatttcacactcaagatcagcagagtggaggctgaggatctgggagtttatttctgctctcaaagtacacatgttccgctcacgttcggtgctgggaccaagctggagctgaaacgggctgatgctgcaccaactgtatccatcttcccaccatccagtgagcagttaacatctggaggtgcctcagtcgtgtgcttcttgaacaacttctaccccaaagacatcaatgtcaagtggaagattgatggcagtgaacgacaaaatggcgtcctgaacagttggactgatcaggacagcaaagacagcacctacagcatgagcagcaccctcacgttgaccaaggacgagtatgaacgacataacagctatacctgtgaggccactcacaagacatcaacttcacccattgtcaagagcttcaacaggaatgagtgttag

SEQ ID NO: 1120 - protein, 718 aa, synthetic construct
MEWTWVFLFLLSVTAGVHSQVQLQQSGAELMKPGASVKISCKATGYTFSNYWIEWVKQRPGHGLEWIGEILPGSDSIKYNENFKGKATFTADTSSNTAYMQLSSLTSEDSAVYYCARRGNYPDYWGQGTTLTVSSAKTTPPSVYPLAPGSAAQTNSMVTLGCLVKGYFPEPVTVTWNSGSLSSGVHTFPAVLQSDLYTLSSSVTVPSSTWPSETVTCNVAHPASSTKVDKKIVPRDCGCKPCICTVPEVSSVFIFPPKPKDVLTITLTPKVTCVVVDISKDDPEVQFSWFVDDVEVHTAQTQPREEQFNSTFRSVSELPIMHQDWLNGKEFKCRVNSAAFPAPIEKTISKTKGRPKAPQVYTIPPPKEQMAKDKVSLTCMITDFFPEDITVEWQWNGQPAENYKNTQPIMDTDGSYFVYSKLNVQKSNWEAGNTFTCSVLHEGLHNHHTEKSLSHSPGRKRREGRGSLLTCGDVEENPGPMKLPVRLLVLMFWIPASSSDVVMTQTPLSLPVSLGDQASISCRSSQSLVHSNGNTYLHWYLQKPGQSPKLLIYKVSNRFSGVPDRFSGSGSGTDFTLKISRVEAEDLGVYFCSQSTHVPLTFGAGTKLELKRADAAPTVSIFPPSSEQLTSGGASVVCFLNNFYPKDINVKWKIDGSERQNGVLNSWTDQDSKDSTYSMSSTLTLTKDEYERHNSYTCEATHKTSTSPIVKSFNRNEC

SEQ ID NO: 1121 - DNA, 2168 bp, synthetic construct
  source 1..2168: mol_type = other DNA
gaggagccaccatggagtggacctgggtgttcctgttcctgctgagcgtgaccgccggcgtgcactcccaagtccagctgcagcagagcggcgccgagctgatgaagcccggcgccagcgtgaagatcagctgcaaggccaccggctacaccttcagcaactactggatcgagtgggtgaagcagcggcccggccacggcctggagtggatcggcgagatcctgcccggcagcgacagcatcaagtacaacgagaacttcaagggcaaggccaccttcaccgccgacaccagcagcaacaccgcctacatgcagctgagcagcctgaccagcgaggacagcgccgtgtactactgcgcccggcggggcaactaccccgactactggggccagggcaccaccctgaccgtctccagcgccaagaccacaccacccagcgtgtacccactggctccaggcagcgctgcccagaccaacagcatggtgaccctgggctgcctggtgaagggctacttccccgagcccgtgaccgtgacctggaacagcggcagcctgagcagcggcgtgcacaccttcccagccgtgctccaaagcgacctgtacacactgagcagcagcgtgaccgtgcccagcagcacctggcccagcgagaccgtgacctgcaacgtggcccaccccgccagcagcaccaaggtggacaagaagatcgtgccccgggactgcggctgcaagccctgcatctgcaccgtgcccgaagtcagcagcgtgttcatcttcccacccaagcccaaggacgtgctgaccatcaccctgacacccaaagtcacctgcgtggtggtggacatcagcaaggacgaccccgaggtgcagttcagctggttcgtggacgacgtggaggtgcacaccgcccagacccagccccgggaggagcagttcaacagcaccttccggagcgtgagcgagctgcccatcatgcaccaggactggctgaacggcaaggagttcaagtgccgggtgaacagcgccgccttccccgcccccatcgagaagaccatcagcaagaccaagggacggcccaaggctccccaggtgtacaccatcccaccacccaaggagcagatggccaaggacaaagtcagcctgacctgcatgatcaccgacttcttccccgaggacatcaccgtggagtggcagtggaacggccagcccgccgagaactacaagaacacccagcccatcatggacaccgacggcagctacttcgtgtacagcaagctgaacgtgcagaagagcaactgggaggccggcaacaccttcacctgcagcgtgctgcacgagggcctgcacaaccatcacaccgagaagagcctgagccacagcccaggacggaagcgccgcgagggcaggggcagcctgctgacctgcggcgacgtggaggagaacccaggccccatgaagctgcccgtgcggctgctggtgctgatgttctggatccccgccagcagcagcgacgtggtgatgacccagaccccactgagcctgcccgtgagcctgggcgaccaggccagcatcagctgccggagcagccagagcctggtgcacagcaacggcaacacctacctgcactggtacctgcagaagcccggccagagccccaagctgctgatctacaaagtcagcaaccggttcagcggcgtgcccgaccggttcagcggcagcggcagcggcaccgacttcaccctgaagatcagccgggtggaggccgaggacctgggcgtgtacttctgcagccagagcacccacgtgcccctgaccttcggcgccggcaccaagctggagctgaagcgggccgacgccgctcccaccgtcagcatcttcccaccctcctccgagcagctgaccagcggaggcgccagcgtggtgtgcttcctgaacaacttctaccccaaggacatcaacgtgaagtggaagatcgacggcagcgagcggcagaacggcgtgctgaacagctggaccgaccaggacagcaaggacagcacctacagcatgagcagcaccctgaccctgaccaaggacgagtacgagcggcacaacagctacacctgcgaggccacccacaagaccagcaccagccccatcgtgaagagcttcaaccggaacgagtgctga

SEQ ID NO: 1122 - DNA, 2174 bp, synthetic construct
  source 1..2174: mol_type = other DNA
gaggagccaccatgggatggagctggatctttctctttctcctgtcaggaactacaggtgtcctctctgaggtccagctgcaacagtctggacctgagctggtgaagcctggggcttcagtgaagatatcctgcaagacttctggatacacattcactgaatacaccatacactgggtgaagcagagccatggagagagccttgagtggattggaggtattaatccaaacgatggtggtactatttacaaccagaagttcaagggcaaggccacattgactgtagacaagtcctccaaaacagcctacatggagctccgcagcctgacatctgaggattctgcagtcttttactgtgcaagagggccctccgccaggtttccttactggggccaagggactctggtcactgtctctgcagccaaaacgacacccccatctgtctatccactggcccctggatctgctgcccaaactaactccatggtgaccctgggatgcctggtcaagggctatttccctgagccagtgacagtgacctggaactctggatccctgtccagcggtgtgcacaccttcccagctgtcctgcagtctgacctctacactctgagcagctcagtgactgtcccctccagcacctggcccagcgagaccgtcacctgcaacgttgcccacccggccagcagcaccaaggtggacaagaaaattgtgcccagggattgtggttgtaagccttgcatatgtacagtcccagaagtatcatctgtcttcatcttccccccaaagcccaaggatgtgctcaccattactctgactcctaaggtcacgtgtgttgtggtagacatcagcaaggatgatcccgaggtccagttcagctggtttgtagatgatgtggaggtgcacacagctcagacgcaaccccgggaggagcagttcaacagcactttccgctcagtcagtgaacttcccatcatgcaccaggactggctcaatggcaaggagttcaaatgcagggtcaacagtgcagctttccctgcccccatcgagaaaaccatctccaaaaccaaaggcagaccgaaggctccacaggtgtacaccattccacctcccaaggagcagatggccaaggataaagtcagtctgacctgcatgataacagacttcttccctgaagacattactgtggagtggcagtggaatgggcagccagcggagaactacaagaacactcagcccatcatggacacagatggctcttacttcgtctacagcaagctcaatgtgcagaagagcaactgggaggcaggaaatactttcacctgctctgtgttacatgagggcctgcacaaccaccatactgagaagagcctctcccactctcctggtagaaagaggcgagagggcagaggaagtcttctaacatgcggtgacgtggaggagaatcccggccctatgatgagtcctgcccagttcctgtttctgttagtgctctggattcgggaaaccaacggtgatgttgtgatgacccagactccactcactttgtcggttaccattggacaaccagcctccatctcttgcaagtcaagtcagagcctcttagatagtgatggaaagacatatttgaattggttgttacagaggccaggccagtctccaaagcgcctaatctatctggtgtctaaactggactctggagtccctgacagattcactggcagtggatcagggacagatttcacactgaaaattagcagagtggaggctgaggatttgggagtttattattgctggcaaggtacacattttcctcggacgttcggtggaggcaccaagctggaaatcaaacgggctgatgctgcaccaactgtatccatcttcccaccatccagtgagcagttaacatctggaggtgcctcagtcgtgtgcttcttgaacaacttctaccccaaagacatcaatgtcaagtggaagattgatggcagtgaacgacaaaatggcgtcctgaacagttggactgatcaggacagcaaagacagcacctacagcatgagcagcaccctcacgttgaccaaggacgagtatgaacgacataacagctatacctgtgaggccactcacaagacatcaacttcacccattgtcaagagcttcaacaggaatgagtgttag

SEQ ID NO: 1123 - protein, 720 aa, synthetic construct
MGWSWIFLFLLSGTTGVLSEVQLQQSGPELVKPGASVKISCKTSGYTFTEYTIHWVKQSHGESLEWIGGINPNDGGTIYNQKFKGKATLTVDKSSKTAYMELRSLTSEDSAVFYCARGPSARFPYWGQGTLVTVSAAKTTPPSVYPLAPGSAAQTNSMVTLGCLVKGYFPEPVTVTWNSGSLSSGVHTFPAVLQSDLYTLSSSVTVPSSTWPSETVTCNVAHPASSTKVDKKIVPRDCGCKPCICTVPEVSSVFIFPPKPKDVLTITLTPKVTCVVVDISKDDPEVQFSWFVDDVEVHTAQTQPREEQFNSTFRSVSELPIMHQDWLNGKEFKCRVNSAAFPAPIEKTISKTKGRPKAPQVYTIPPPKEQMAKDKVSLTCMITDFFPEDITVEWQWNGQPAENYKNTQPIMDTDGSYFVYSKLNVQKSNWEAGNTFTCSVLHEGLHNHHTEKSLSHSPGRKRREGRGSLLTCGDVEENPGPMMSPAQFLFLLVLWIRETNGDVVMTQTPLTLSVTIGQPASISCKSSQSLLDSDGKTYLNWLLQRPGQSPKRLIYLVSKLDSGVPDRFTGSGSGTDFTLKISRVEAEDLGVYYCWQGTHFPRTFGGGTKLEIKRADAAPTVSIFPPSSEQLTSGGASVVCFLNNFYPKDINVKWKIDGSERQNGVLNSWTDQDSKDSTYSMSSTLTLTKDEYERHNSYTCEATHKTSTSPIVKSFNRNEC

SEQ ID NO: 1124 - DNA, 2174 bp, synthetic construct
  source 1..2174: mol_type = other DNA
gaggagccaccatgggctggagctggatcttcctgttcctgctgagcggcaccaccggcgtgctgagcgaggtgcagctgcagcagagcggccccgagctggtgaagcccggcgccagcgtgaagatcagctgcaagaccagcggctacaccttcaccgagtacaccatccactgggtgaagcagagccacggcgagagcctggagtggatcggcggcatcaaccccaacgacggcggcaccatctacaaccagaagttcaagggcaaggccaccctgaccgtggacaagagcagcaagaccgcctacatggagctgcggagcctgaccagcgaggacagcgccgtgttctactgcgctcggggccccagcgcccggttcccctactggggccagggcaccctggtgaccgtgagcgccgccaagaccacaccacccagcgtgtacccactggctccaggcagcgctgcccaaaccaacagcatggtgaccctgggctgcctggtgaagggctacttccccgagcccgtgaccgtgacctggaacagcggcagcctgagcagcggcgtgcacaccttcccagctgtgctccagtccgacctgtacaccctgagcagcagcgtgaccgtgcccagcagcacctggcccagcgagaccgtgacctgcaacgtggcccaccccgccagcagcaccaaggtggacaagaagatcgtgccccgggactgcggctgcaagccctgcatctgcaccgtgcctgaggtctccagcgtgttcatcttcccccccaagcccaaggacgtgctgaccatcaccctgacccctaaagtcacctgcgtggtggtggacatcagcaaggacgaccccgaggtgcagttcagctggttcgtggacgacgtggaggtgcacaccgcccagacccagccccgggaggagcagttcaacagcaccttccggagcgtgagcgagctgcccatcatgcaccaggactggctgaacggcaaggagttcaagtgccgggtgaacagcgccgccttccccgcccccatcgagaagaccatcagcaagaccaagggccgacccaaggccccacaggtgtacaccatcccaccacccaaggagcagatggccaaggacaaagtcagcctgacctgcatgatcaccgacttcttccccgaggacatcaccgtggagtggcagtggaacggccagccagccgagaactacaagaacacccagcccatcatggacaccgacggcagctacttcgtgtacagcaagctgaacgtgcagaagagcaactgggaggccggcaacaccttcacctgcagcgtgctgcacgagggcctgcacaaccaccacaccgagaagagcctgagccacagccccggacggaagcggcgcgagggacggggcagcctgctgacctgcggcgacgtggaggagaacccaggccccatgatgagcccagcccagttcctgttcctgctggtgctgtggatccgggagaccaacggcgacgtggtgatgacccagaccccactgaccctgagcgtgaccatcggccagcccgccagcatcagctgcaagagcagccagagcctgctggacagcgacggcaagacctacctgaactggctgctgcagcggccaggccagagccccaagcggctgatctatctcgtcagcaagctggacagcggcgtgcccgaccggttcaccggcagcggcagcggcaccgacttcaccctgaagatcagccgggtggaggccgaggacctgggcgtgtactactgctggcagggcacccactttccccggaccttcggcggcggcaccaagctggagatcaagcgggccgacgccgccccaacagtcagcatctttccaccatcctccgagcagctcaccagcggcggcgccagcgtggtgtgcttcctgaacaacttctaccccaaggacatcaacgtgaagtggaagatcgacggcagcgagcggcagaacggcgtgctgaacagctggaccgaccaggacagcaaggacagcacctacagcatgagcagcaccctgaccctgaccaaggacgagtacgagcggcacaacagctacacctgcgaggccacccacaagaccagcaccagccccatcgtgaagagcttcaaccggaacgagtgctga

SEQ ID NO: 1125 - DNA, 3962 bp, synthetic construct
  source 1..3962: mol_type = other DNA
ctgcgcgctcgctcgctcactgaggccgcccgggcaaagcccgggcgtcgggcgacctttggtcgcccggcctcagtgagcgagcgagcgcgcagagagggagtggccaactccatcactaggggttccttgtagttaatgattaacccgccatgctacttatctaccagggtaatggggatcctctagaactatagctagtcgacattgattattgactagttattaatagtaatcaattacggggtcattagttcatagcccatatatggagttccgcgttacataacttacggtaaatggcccgcctggctgaccgcccaacgacccccgcccattgacgtcaataatgacgtatgttcccatagtaacgccaatagggactttccattgacgtcaatgggtggagtatttacggtaaactgcccacttggcagtacatcaagtgtatcatatgccaagtacgccccctattgacgtcaatgacggtaaatggcccgcctggcattatgcccagtacatgaccttatgggactttcctacttggcagtacatctacgtattagtcatcgctattaccatgtcgaggccacgttctgcttcactctccccatctcccccccctccccacccccaattttgtatttatttattttttaattattttgtgcagcgatgggggcggggggggggggcgcgcgccaggcggggcggggcggggcgaggggcggggcggggcgaggcggagaggtgcggcggcagccaatcagagcggcgcgctccgaaagtttccttttatggcgaggcggcggcggcggcggccctataaaaagcgaagcgcgcggcgggcgggagcaagcttcgtttagtgaaccgtcagatcgcctggagacgccatccacgctgttttgacctccatagaagacaccgggaccgatccagcctccgcggattcgaatcccggccgggaacggtgcattggaacgcggattccccgtgccaagagtgacgtaagtaccgcctatagagtctataggcccacaaaaaatgctttcttcttttaatatacttttttgtttatcttatttctaatactttccctaatctctttctttcagggcaataatgatacaatgtatcatgcctctttgcaccattctaaagaataacagtgataatttctgggttaaggcaatagcaatatttctgcatataaatatttctgcatataaattgtaactgatgtaagaggtttcatattgctaatagcagctacaatccagctaccattctgcttttattttatggttgggataaggctggattattctgagtccaagctaggcccttttgctaatcatgttcatacctcttatcttcctcccacagctcctgggcaacgtgctggtctgtgtgctggcccatcactttggcaaagaattgggattcgaaccggtgccgccaccatgaacttcgggctcagcttgattttccttgtccttgttttaaaaggtgtccagtgtcaagtgcagctgcagcagcctggcaccgagctggtgaaacctggatctagcgtgaatctgagctgcaaggccagcggctttaccttcaccagatactggatgcactgggtcaaggaacggccaggccacggcctggaatggatcggcaatatcaaccccaacaacggcggaacagatttcaacgagaagttcaagaacaaggctacactgaccgtgcacaaaagctccaccaccgtgttcatccagctgagctctctgacaagcgaggacagcgccgtgtactattgtgccagaggcaccggcaccggcgccatggactactggggccagggaacatctgtgacagtgtccagcgccaaaacgacacccccatctgtctatccactggcccctggatctgctgcccaaactaactccatggtgaccctgggatgcctggtcaagggctatttccctgagccagtgacagtgacctggaactctggatccctgtccagcggtgtgcacaccttcccagctgtcctgcagtctgacctctacactctgagcagctcagtgactgtcccctccagcacctggcccagcgagaccgtcacctgcaacgttgcccacccggccagcagcaccaaggtggacaagaaaattgtgcccagggattgtggttgtaagccttgcatatgtacagtcccagaagtatcatctgtcttcatcttccccccaaagcccaaggatgtgctcaccattactctgactcctaaggtcacgtgtgttgtggtagacatcagcaaggatgatcccgaggtccagttcagctggtttgtagatgatgtggaggtgcacacagctcagacgcaaccccgggaggagcagttcaacagcactttccgctcagtcagtgaacttcccatcatgcaccaggactggctcaatggcaaggagttcaaatgcagggtcaacagtgcagctttccctgcccccatcgagaaaaccatctccaaaaccaaaggcagaccgaaggctccacaggtgtacaccattccacctcccaaggagcagatggccaaggataaagtcagtctgacctgcatgataacagacttcttccctgaagacattactgtggagtggcagtggaatgggcagccagcggagaactacaagaacactcagcccatcatggacacagatggctcttacttcgtctacagcaagctcaatgtgcagaagagcaactgggaggcaggaaatactttcacctgctctgtgttacatgagggcctgcacaaccaccatactgagaagagcctctcccactctcctggtagaaagaggcgagagggcagaggaagtcttctaacatgcggtgacgtggaggagaatcccggccctatgaagttgcctgttaggctgttggtgctgatgttctggattcctgcttccagcagtgatgtggtgatgacacagacccctctgagcctgcctgtgtccctcggcgaccaggccagcatcagctgtagaagcagccaatctctggtgcacaacaatggcatcacctacctgtactggtatctgcagaaacctggccagagccccaagctgctgatctaccgggtgtccaatcggttcagcggagtgccagatagatttggcggatctggcagcggcaccgacttcaccctgaagatctctagagtcgaggccgaggacctgggcgtgtacttctgcttccagggcacacacgtgcccagaaccttcggcggcggaacaaagctggaaatcaagcgggctgatgctgcaccaactgtatccatcttcccaccatccagtgagcagttaacatctggaggtgcctcagtcgtgtgcttcttgaacaacttctaccccaaagacatcaatgtcaagtggaagattgatggcagtgaacgacaaaatggcgtcctgaacagttggactgatcaggacagcaaagacagcacctacagcatgagcagcaccctcacgttgaccaaggacgagtatgaacgacataacagctatacctgtgaggccactcacaagacatcaacttcacccattgtcaagagcttcaacaggaatgagtgttaactcgaggacggggtgaactacgcctgaggatccgatctttttccctctgccaaaaattatggggacatcatgaagccccttgagcatctgacttctggctaataaaggaaatttattttcattgcaatagtgtgttggaattttttgtgtctctcactcggcctaggtagataagtagcatggcgggttaatcattaactacaaggaacccctagtgatggagttggccactccctctctgcgcgctcgctcgctcactgaggccgggcgaccaaaggtcgcccgacgcccgggctttgcccgggcggcctcagtgagcgagcgagcgcgcag

SEQ ID NO: 1126 - DNA, 130 bp, synthetic construct
  source 1..130: mol_type = other DNA
ctgcgcgctcgctcgctcactgaggccgcccgggcaaagcccgggcgtcgggcgacctttggtcgcccggcctcagtgagcgagcgagcgcgcagagagggagtggccaactccatcactaggggttcct

SEQ ID NO: 1127 - DNA, 380 bp, synthetic construct
  source 1..380: mol_type = other DNA
gacattgattattgactagttattaatagtaatcaattacggggtcattagttcatagcccatatatggagttccgcgttacataacttacggtaaatggcccgcctggctgaccgcccaacgacccccgcccattgacgtcaataatgacgtatgttcccatagtaacgccaatagggactttccattgacgtcaatgggtggagtatttacggtaaactgcccacttggcagtacatcaagtgtatcatatgccaagtacgccccctattgacgtcaatgacggtaaatggcccgcctggcattatgcccagtacatgaccttatgggactttcctacttggcagtacatctacgtattagtcatcgctattaccatg

SEQ ID NO: 1128 - DNA, 260 bp, synthetic construct
  source 1..260: mol_type = other DNA
ccacgttctgcttcactctccccatctcccccccctccccacccccaattttgtatttatttattttttaattattttgtgcagcgatgggggcggggggggggggcgcgcgccaggcggggcggggcggggcgaggggcggggcggggcgaggcggagaggtgcggcggcagccaatcagagcggcgcgctccgaaagtttccttttatggcgaggcggcggcggcggcggccctataaaaagcgaagcgcgcggcggg

SEQ ID NO: 1129 - DNA, 566 bp, synthetic construct
  source 1..566: mol_type = other DNA
tcagatcgcctggagacgccatccacgctgttttgacctccatagaagacaccgggaccgatccagcctccgcggattcgaatcccggccgggaacggtgcattggaacgcggattccccgtgccaagagtgacgtaagtaccgcctatagagtctataggcccacaaaaaatgctttcttcttttaatatacttttttgtttatcttatttctaatactttccctaatctctttctttcagggcaataatgatacaatgtatcatgcctctttgcaccattctaaagaataacagtgataatttctgggttaaggcaatagcaatatttctgcatataaatatttctgcatataaattgtaactgatgtaagaggtttcatattgctaatagcagctacaatccagctaccattctgcttttattttatggttgggataaggctggattattctgagtccaagctaggcccttttgctaatcatgttcatacctcttatcttcctcccacagctcctgggcaacgtgctggtctgtgtgctggcccatcactttggcaaagaatt

SEQ ID NO: 1130 - DNA, 57 bp, synthetic construct; identical to SEQ ID NO: 1083
  source 1..57: mol_type = other DNA

SEQ ID NO: 1131 - DNA, 354 bp, synthetic construct; identical to SEQ ID NO: 7
  source 1..354: mol_type = other DNA

SEQ ID NO: 1132 - DNA, 969 bp, synthetic construct
  source 1..969: mol_type = other DNA
gccaaaacgacacccccatctgtctatccactggcccctggatctgctgcccaaactaactccatggtgaccctgggatgcctggtcaagggctatttccctgagccagtgacagtgacctggaactctggatccctgtccagcggtgtgcacaccttcccagctgtcctgcagtctgacctctacactctgagcagctcagtgactgtcccctccagcacctggcccagcgagaccgtcacctgcaacgttgcccacccggccagcagcaccaaggtggacaagaaaattgtgcccagggattgtggttgtaagccttgcatatgtacagtcccagaagtatcatctgtcttcatcttccccccaaagcccaaggatgtgctcaccattactctgactcctaaggtcacgtgtgttgtggtagacatcagcaaggatgatcccgaggtccagttcagctggtttgtagatgatgtggaggtgcacacagctcagacgcaaccccgggaggagcagttcaacagcactttccgctcagtcagtgaacttcccatcatgcaccaggactggctcaatggcaaggagttcaaatgcagggtcaacagtgcagctttccctgcccccatcgagaaaaccatctccaaaaccaaaggcagaccgaaggctccacaggtgtacaccattccacctcccaaggagcagatggccaaggataaagtcagtctgacctgcatgataacagacttcttccctgaagacattactgtggagtggcagtggaatgggcagccagcggagaactacaagaacactcagcccatcatggacacagatggctcttacttcgtctacagcaagctcaatgtgcagaagagcaactgggaggcaggaaatactttcacctgctctgtgttacatgagggcctgcacaaccaccatactgagaagagcctctcccactctcctggt

SEQ ID NO: 1133 - DNA, 12 bp, synthetic construct
  source 1..12: mol_type = other DNA
agaaagaggcga

SEQ ID NO: 1134 - DNA, 54 bp, synthetic construct
  source 1..54: mol_type = other DNA
gagggcagaggaagtcttctaacatgcggtgacgtggaggagaatcccggccct

SEQ ID NO: 1135 - DNA, 57 bp, synthetic construct; identical to SEQ ID NO: 169
  source 1..57: mol_type = other DNA

SEQ ID NO: 1136 - DNA, 336 bp, synthetic construct; identical to SEQ ID NO: 63
  source 1..336: mol_type = other DNA

SEQ ID NO: 1137 - DNA, 321 bp, synthetic construct; identical to SEQ ID NO: 196
  source 1..321: mol_type = other DNA

SEQ ID NO: 1138 - DNA, 127 bp, synthetic construct
  source 1..127: mol_type = other DNA
gatctttttccctctgccaaaaattatggggacatcatgaagccccttgagcatctgacttctggctaataaaggaaatttattttcattgcaatagtgtgttggaattttttgtgtctctcactcg

SEQ ID NO: 1139 - DNA, 130 bp, synthetic construct
  source 1..130: mol_type = other DNA
aggaacccctagtgatggagttggccactccctctctgcgcgctcgctcgctcactgaggccgggcgaccaaaggtcgcccgacgcccgggctttgcccgggcggcctcagtgagcgagcgagcgcgcag

SEQ ID NO: 1140 - protein, 19 aa, synthetic construct
MNFGLSLIFLVLVLKGVQC

SEQ ID NO: 1141 - protein, 118 aa, synthetic construct
QVQLQQPGTELVKPGSSVNLSCKASGFTFTRYWMHWVKERPGHGLEWIGNINPNNGGTDFNEKFKNKATLTVHKSSTTVFIQLSSLTSEDSAVYYCARGTGTGAMDYWGQGTSVTVSS

SEQ ID NO: 1142 - protein, 323 aa, synthetic construct
AKTTPPSVYPLAPGSAAQTNSMVTLGCLVKGYFPEPVTVTWNSGSLSSGVHTFPAVLQSDLYTLSSSVTVPSSTWPSETVTCNVAHPASSTKVDKKIVPRDCGCKPCICTVPEVSSVFIFPPKPKDVLTITLTPKVTCVVVDISKDDPEVQFSWFVDDVEVHTAQTQPREEQFNSTFRSVSELPIMHQDWLNGKEFKCRVNSAAFPAPIEKTISKTKGRPKAPQVYTIPPPKEQMAKDKVSLTCMITDFFPEDITVEWQWNGQPAENYKNTQPIMDTDGSYFVYSKLNVQKSNWEAGNTFTCSVLHEGLHNHHTEKSLSHSPG

SEQ ID NO: 1143 - protein, 19 aa, synthetic construct
MKLPVRLLVLMFWIPASSS

SEQ ID NO: 1144 - protein, 112 aa, synthetic construct
DVVMTQTPLSLPVSLGDQASISCRSSQSLVHNNGITYLYWYLQKPGQSPKLLIYRVSNRFSGVPDRFGGSGSGTDFTLKISRVEAEDLGVYFCFQGTHVPRTFGGGTKLEIK

SEQ ID NO: 1145 - protein, 107 aa, synthetic construct
RADAAPTVSIFPPSSEQLTSGGASVVCFLNNFYPKDINVKWKIDGSERQNGVLNSWTDQDSKDSTYSMSSTLTLTKDEYERHNSYTCEATHKTSTSPIVKSFNRNEC

SEQ ID NO: 1146 - protein, 441 aa, Homo sapiens
MAEPRQEFEVMEDHAGTYGLGDRKDQGGYTMHQDQEGDTDAGLKESPLQTPTEDGSEEPGSETSDAKSTPTAEDVTAPLVDEGAPGKQAAAQPHTEIPEGTTAEEAGIGDTPSLEDEAAGHVTQARMVSKSKDGTGSDDKKAKGADGKTKIATPRGAAPPGQKGQANATRIPAKTPPAPKTPPSSGEPPKSGDRSGYSSPGSPGTPGSRSRTPSLPTPPTREPKKVAVVRTPPKSPSSAKSRLQTAPVPMPDLKNVKSKIGSTENLKHQPGGGKVQIINKKLDLSNVQSKCGSKDNIKHVPGGGSVQIVYKPVDLSKVTSKCGSLGNIHHKPGGGQVEVKSEKLDFKDRVQSKIGSLDNITHVPGGGNKKIETHKLTFRENAKAKTDHGAEIVYKSPVVSGDTSPRHLSNVSSTGSIDMVDSPQLATLADEVSASLAKQGL

SEQ ID NO: 1147 - protein, 18 aa, synthetic construct
  SITE 11: note = Phosphorylated residue
SPGTPGSRSRTPSLPTPP

SEQ ID NO: 1148 - protein, 15 aa, synthetic construct
  SITE 8: note = Phosphorylated residue
SRTPSLPTPPTREPK

SEQ ID NO: 1149 - protein, 15 aa, synthetic construct
  SITE 8: note = Phosphorylated residue
KKVAVVRTPPKSPSS

SEQ ID NO: 1150 - protein, 20 aa, synthetic construct
  SITE 8: note = Phosphorylated residue
  SITE 13: note = Phosphorylated residue
TPGSRSRTPSLPTPPTREPK

SEQ ID NO: 1151 - protein, 29 aa, synthetic construct
  SITE 8: note = Phosphorylated residue
  SITE 22: note = Phosphorylated residue
SRTPSLPTPPTREPKKVAVVRTPPKSPSS

SEQ ID NO: 1152 - protein, 34 aa, synthetic construct
  SITE 8: note = Phosphorylated residue
  SITE 13: note = Phosphorylated residue
  SITE 27: note = Phosphorylated residue
TPGSRSRTPSLPTPPTREPKKVAVVRTPPKSPSS

SEQ ID NO: 1153 - protein, 34 aa, synthetic construct; identical to SEQ ID NO: 1152

SEQ ID NO: 1154 - protein, 34 aa, synthetic construct; identical to SEQ ID NO: 1152
  SITE 8: note = Phosphorylated residue
  SITE 27: note = Phosphorylated residue

SEQ ID NO: 1155 - protein, 49 aa, synthetic construct
TPPSSGEPPKSGDRSGYSSPGSPGTPGSRSRTPSLPTPPTREPKKVAVV

SEQ ID NO: 1156 - protein, 20 aa, synthetic construct
  SITE 8: note = Phosphorylated residue
  SITE 13: note = Phosphorylated residue
TPGSRSRTPSLPTPPTREPK

SEQ ID NO: 1157 - protein, 19 aa, synthetic construct
  SITE 9: note = Phosphorylated residue
  SITE 11: note = Phosphorylated residue
  SITE 14: note = Phosphorylated residue
GTPGSRSRTPSLPTPPTRE

SEQ ID NO: 1158 - protein, 37 aa, synthetic construct
  SITE 18: note = Phosphorylated residue
  SITE 26: note = Phosphorylated residue
  SITE 31: note = Phosphorylated residue
RENAKAKTDHGAEIVYKSPVVSGDTSPRHLSNVSSTG

SEQ ID NO: 1159 - protein, 8 aa, synthetic construct
PTREPKKV

SEQ ID NO: 1160 - protein, 7 aa, synthetic construct
ARMVSKS

SEQ ID NO: 1161 - protein, 24 aa, synthetic construct
SPSSAKSRLQTAPVPMPDLKNVKS

SEQ ID NO: 1162 - protein, 29 aa, synthetic construct
  SITE 18: note = Phosphorylated residue
DHGAEIVYKSPVVSGDTSPRHLSNVSSTG

SEQ ID NO: 1163 - protein, 16 aa, synthetic construct
  SITE 4: note = Phosphorylated residue
  SITE 9: note = Phosphorylated residue
CSRTPSLPTPPTREPK

SEQ ID NO: 1164 - protein, 18 aa, synthetic construct
  SITE 3: note = Phosphorylated residue
  SITE 6: note = Phosphorylated residue
  SITE 7: note = Phosphorylated residue
  SITE 10: note = Phosphorylated residue
  SITE 13: note = Phosphorylated residue
  SITE 16: note = Phosphorylated residue
  SITE 18: note = Phosphorylated residue
DRSGYSSPGSPGTPGSRS

SEQ ID NO: 1165 - protein, 24 aa, synthetic construct
  SITE 9: note = Phosphorylated residue
SGDRSGYSSPGSPGTPGSRSRTPS

SEQ ID NO: 1166 - protein, 24 aa, synthetic construct
  SITE 12: note = Phosphorylated residue
SGDRSGYSSPGSPGTPGSRSRTPS

SEQ ID NO: 1167 - protein, 24 aa, synthetic construct
  SITE 15: note = Phosphorylated residue
SGDRSGYSSPGSPGTPGSRSRTPS

SEQ ID NO: 1168 - protein, 24 aa, synthetic construct
  SITE 9: note = Phosphorylated residue
  SITE 12: note = Phosphorylated residue
  SITE 15: note = Phosphorylated residue
SGDRSGYSSPGSPGTPGSRSRTPS

SEQ ID NO: 1169 - protein, 24 aa, synthetic construct
  SITE 9: note = Phosphorylated residue
  SITE 12: note = Phosphorylated residue
SGDRSGYSSPGSPGTPGSRSRTPS

SEQ ID NO: 1170 - protein, 24 aa, synthetic construct
  SITE 12: note = Phosphorylated residue
  SITE 15: note = Phosphorylated residue
SGDRSGYSSPGSPGTPGSRSRTPS

SEQ ID NO: 1171 - protein, 24 aa, synthetic construct
  SITE 9: note = Phosphorylated residue
  SITE 15: note = Phosphorylated residue
SGDRSGYSSPGSPGTPGSRSRTPS

SEQ ID NO: 1172 - protein, 19 aa, synthetic construct
  SITE 9: note = Phosphorylated residue
GTPGSRSRTPSLPTPPTRE

SEQ ID NO: 1173 - protein, 19 aa, synthetic construct
  SITE 11: note = Phosphorylated residue
GTPGSRSRTPSLPTPPTRE

SEQ ID NO: 1174 - protein, 19 aa, synthetic construct
  SITE 14: note = Phosphorylated residue
GTPGSRSRTPSLPTPPTRE

SEQ ID NO: 1175 - protein, 19 aa, synthetic construct
  SITE 9: note = Phosphorylated residue
  SITE 11: note = Phosphorylated residue
GTPGSRSRTPSLPTPPTRE

SEQ ID NO: 1176 - protein, 19 aa, synthetic construct
  SITE 9: note = Phosphorylated residue
  SITE 14: note = Phosphorylated residue
GTPGSRSRTPSLPTPPTRE

SEQ ID NO: 1177 - protein, 19 aa, synthetic construct
  SITE 11: note = Phosphorylated residue
  SITE 14: note = Phosphorylated residue
GTPGSRSRTPSLPTPPTRE

SEQ ID NO: 1178 - protein, 19 aa, synthetic construct
  SITE 9: note = Phosphorylated residue
  SITE 11: note = Phosphorylated residue
  SITE 14: note = Phosphorylated residue
GTPGSRSRTPSLPTPPTRE

SEQ ID NO: 1179 - protein, 18 aa, synthetic construct
  SITE 1: note = Phosphorylated residue
  SITE 4: note = Phosphorylated residue
  SITE 15: note = Phosphorylated residue
TPPTREPKKVAVVRTPPK

SEQ ID NO: 1180 - protein, 16 aa, synthetic construct
  SITE 7: note = Phosphorylated residue
KVAVVRTPPKSPSSAK

SEQ ID NO: 1181 - protein, 18 aa, synthetic construct
  SITE 11: note = Phosphorylated residue
KVAVVRTPPKSPSSAKPS

SEQ ID NO: 1182 - protein, 18 aa, synthetic construct
  SITE 7: note = Phosphorylated residue
  SITE 11: note = Phosphorylated residue
KVAVVRTPPKSPSSAKPS

SEQ ID NO: 1183 - protein, 22 aa, synthetic construct
  SITE 5: note = Phosphorylated residue
  SITE 8: note = Phosphorylated residue
  SITE 9: note = Phosphorylated residue
  SITE 10: note = Phosphorylated residue
  SITE 12: note = Phosphorylated residue
  SITE 18: note = Phosphorylated residue
GSGSSNVSSTGSIDLVDSPQLA

SEQ ID NO: 1184 - protein, 22 aa, synthetic construct
  SITE 18: note = Phosphorylated residue
GSGSSNVSSTGSIDLVDSPQLA

SEQ ID NO: 1185 - protein, 22 aa, synthetic construct
  SITE 12: note = Phosphorylated residue
  SITE 18: note = Phosphorylated residue
GSGSSNVSSTGSIDLVDSPQLA

SEQ ID NO: 1186 - DNA, 435 bp, synthetic construct
  source 1..435: mol_type = other DNA
atggcgacgggttcaagaacttccctacttcttgcatttggcctgctttgtttgccgtggttacaggagggctcggcagctgccgaggtccagctgcaacagtctggacctgagctggtgaagcctggggcttcagtgaagatatcctgcaagacttctggatacacattcactgaatacaccatacactgggtgaagcagagccatggagagagccttgagtggattggaggtattaatccaaacgatggtggtactatttacaaccagaagttcaagggcaaggccacattgactgtagacaagtcctccaaaacagcctacatggagctccgcagcctgacatctgaggattctgcagtcttttactgtgcaagagggccctccgccaggtttccttactggggccaagggactctggtcactgtctctgca

SEQ ID NO: 1187 - DNA, 408 bp, synthetic construct
  source 1..408: mol_type = other DNA
atgggatggagctggatctttctctttctcctgtcaggaactacaggtgtcctctctgaggtccagctgcaacagtctggacctgagctggtgaagcctggggcttcagtgaagatatcctgcaagacttctggatacacattcactgaatacaccatacactgggtgaagcagagccatggagagagccttgagtggattggaggtattaatccaaacgatggtggtactatttacaaccagaagttcaagggcaaggccacattgactgtagacaagtcctccaaaacagcctacatggagctccgcagcctgacatctgaggattctgcagtcttttactgtgcaagagggccctccgccaggtttccttactggggccaagggactctggtcactgtctctgca

SEQ ID NO: 1188 - protein, 8 aa, synthetic construct
GGSISNYY

SEQ ID NO: 1189 - protein, 7 aa, synthetic construct
VYTSGSA

SEQ ID NO: 1190 - protein, 8 aa, synthetic construct
ARDRGLYY

SEQ ID NO: 1191 - protein, 25 aa, synthetic construct
QVQLQESGPGLVKPSETLSLTCTVS

SEQ ID NO: 1192 - protein, 17 aa, synthetic construct
WTWIRQPAGKGLEWIGR

SEQ ID NO: 1193 - protein, 38 aa, synthetic construct
NYNPSLKSRVTMSVDTSKNQFSLTLSSVTAADTAVYYC

SEQ ID NO: 1194 - protein, 11 aa, synthetic construct
WGQGTLVTVSS

SEQ ID NO: 1195 - protein, 11 aa, synthetic construct
QSLVHSDGNTY

SEQ ID NO: 1196 - skipped

SEQ ID NO: 1197 - protein, 9 aa, synthetic construct
MQATQFPLT

SEQ ID NO: 1198 - protein, 26 aa, synthetic construct
DIVMTQTPLSSLVTLGQPASISCRSS

SEQ ID NO: 1199 - protein, 17 aa, synthetic construct
LSWLQQRPGQPPRLLIY

SEQ ID NO: 1200 - protein, 36 aa, synthetic construct
KRFFGVPDRFSGSGAGTDFTLKINRVEAEDVGIYYC

SEQ ID NO: 1201 - protein, 10 aa, synthetic construct
FGGGTKVEIK

SEQ ID NO: 1202 - protein, 114 aa, synthetic construct
QVQLQESGPGLVKPSETLSLTCTVSGGSISNYYWTWIRQPAGKGLEWIGRVYTSGSANYNPSLKSRVTMSVDTSKNQFSLTLSSVTAADTAVYYCARDRGLYYWGQGTLVTVSS

SEQ ID NO: 1203 - protein, 112 aa, synthetic construct
DIVMTQTPLSSLVTLGQPASISCRSSQSLVHSDGNTYLSWLQQRPGQPPRLLIYKISKRFFGVPDRFSGSGAGTDFTLKINRVEAEDVGIYYCMQATQFPLTFGGGTKVEIK

SEQ ID NO: 1204 - DNA, 342 bp, synthetic construct
  source 1..342: mol_type = other DNA
caggtgcagctgcaggagtcgggcccaggactggtgaagccttcggagaccctgtccctcacctgcactgtctctggtggctccatcagtaattactactggacctggatccggcagcccgccgggaagggactggagtggattgggcgtgtctataccagtgggagcgccaactacaacccctccctcaagagtcgagttaccatgtcagtagacacgtccaagaaccagttctccctgacgctgagctctgtgaccgccgcggacacggccgtgtattactgtgcgagagatagaggactctactactggggccagggaaccctggtcaccgtctcctca

SEQ ID NO: 1205 - DNA, 336 bp, synthetic construct
  source 1..336: mol_type = other DNA
gatattgtgatgacccagactccactctcctcacttgtcacccttggacagccggcctccatctcctgcaggtctagtcaaagcctcgtacacagtgatggaaacacctatttgagttggcttcagcagaggccaggccagcctccaagactcctaatttataagatttctaagcggttctttggggtcccagacagattcagtggcagtggggcagggacagatttcacactgaaaatcaacagggtggaagctgaggatgtcgggatttattactgcatgcaagctacacaatttccgctcactttcggcggagggaccaaggtggagatcaaa

SEQ ID NO: 1206 - protein, 8 aa, synthetic construct
RFTFSNYN

SEQ ID NO: 1207 - protein, 8 aa, synthetic construct
ISSSSSTI

SEQ ID NO: 1208 - protein, 7 aa, synthetic construct
ASLGRGY

SEQ ID NO: 1209 - protein, 25 aa, synthetic construct [sequence omitted]

SEQ ID NO: 1210 - protein, 17 aa, synthetic construct
MNWVRQAPGKGLEWISY

SEQ ID NO: 1211 - protein, 38 aa, synthetic construct
YYADSVKGRFTISRDNAKNSLSLQMNSLRDEDTAVYYC

SEQ ID NO: 1212 - protein, 9 aa, synthetic construct
MQATQFPRT

SEQ ID NO: 1213 - protein, 26 aa, synthetic construct
DIVMTQTPLSSPVTLGQPASISCRSS

SEQ ID NO: 1214 - protein, 36 aa, synthetic construct
NRFSGVPDRFSGSGAGTDFTLKISRVEAEDVGVYYC

SEQ ID NO: 1215 - protein, 10 aa, synthetic construct
FGQGSKLEIK

SEQ ID NO: 1216 - protein, 114 aa, synthetic construct
EVQLVESGGGLVQPGGSLRLSCAASRFTFSNYNMNWVRQAPGKGLEWISYISSSSSTIYYADSVKGRFTISRDNAKNSLSLQMNSLRDEDTAVYYCASLGRGYWGQGTLVTVSS

SEQ ID NO: 1217 - protein, 112 aa, synthetic construct
DIVMTQTPLSSPVTLGQPASISCRSSQSLVHSDGNTYLSWLQQRPGQPPRLLIYKISNRFSGVPDRFSGSGAGTDFTLKISRVEAEDVGVYYCMQATQFPRTFGQGSKLEIK

SEQ ID NO: 1218 - DNA, 342 bp, synthetic construct
  source 1..342: mol_type = other DNA
gaggtgcagctggtggagtctgggggaggcttggtacagcctggggggtccctgagactctcctgtgcagcctctagattcaccttcagtaactataacatgaactgggtccgccaggctccagggaaggggctggagtggatttcatacattagtagtagtagtagtaccatatactacgcagactctgtgaagggccgattcaccatctccagagacaatgccaagaactcactgtctctgcaaatgaacagcctgagagacgaggacacggctgtgtattactgtgcgagtctggggaggggctactggggccagggaaccctggtcaccgtctcctca

SEQ ID NO: 1219 - DNA, 336 bp, synthetic construct
  source 1..336: mol_type = other DNA
gatattgtgatgacccagactccactctcctcacctgtcacccttggacagccggcctccatctcctgcaggtctagtcaaagcctcgtacacagtgatggaaacacctacttgagttggcttcagcagaggccaggccagcctccaagactcctaatttataagatttctaaccggttctctggggtcccagacagattcagtggcagtggggcagggacagatttcacactgaaaatcagcagggtggaagctgaggatgtcggggtttattattgtatgcaagctactcaatttcctcgcacttttggccaggggtccaagctggagatcaaa

SEQ ID NO: 1220 - protein, 8 aa, synthetic construct
GFTFSDYS

SEQ ID NO: 1221 - protein, 8 aa, synthetic construct
IRSSSSII

SEQ ID NO: 1222 - protein, 8 aa, synthetic construct
ARRGHFDY

SEQ ID NO: 1223 - protein, 25 aa, synthetic construct
EVQLVESGGGLVQAGGSLRLSCAAS

SEQ ID NO: 1224 - protein, 17 aa, synthetic construct
MNWVRQAPGKGLEWVSY

SEQ ID NO: 1225 - protein, 38 aa, synthetic construct
YYADSVKGRFTISRDNAKNSLHLQMNSLRDEDTAVYYC

SEQ ID NO: 1226 - protein, 6 aa, synthetic construct
QSVSDY

SEQ ID NO: 1227 - skipped

SEQ ID NO: 1228 - protein, 9 aa, synthetic construct
QQRSNWPLT

SEQ ID NO: 1229 - DNA, 348 bp, synthetic construct
  source 1..348: mol_type = other DNA
aagctggtggagagcggcggcgacctggtgaagcctggcggcagcctgaagctgagctgcgccgccagcggcttcaccttcagcagctacgccatgagctgggtgagacagaaccctgagaagagactggagtgggtggccagcatcagcaagggcggcaacacctactaccctaacagcgtgaagggcagattcaccatcagcagagacaacgccagaaacatcctgtacctgcagatgagcagcctgagaagcgaggacaccgccctgtactactgcgccagaggctggggcgactacggctggttcgcctactggggccaggtgaccctggtgaccgtgagcgcc

SEQ ID NO: 1230 - protein, 26 aa, synthetic construct [sequence omitted]

SEQ ID NO: 1231 - DNA, 309 bp, synthetic construct
  source 1..309: mol_type = other DNA
gccaaaacgacacccccatctgtctatccactggcccctggatctgctgcccaaactaactccatggtgaccctgggatgcctggtcaagggctatttccctgagccagtgacagtgacctggaactctggatccctgtccagcggtgtgcacaccttcccagctgtcctgcagtctgacctctacactctgagcagctcagtgactgtcccctccagcacctggcccagcgagaccgtcacctgcaacgttgcccacccggccagcagcaccaaggtggacaagaaaattgtgcccagggattgtggt

SEQ ID NO: 1232 - protein, 17 aa, synthetic construct
LAWYQQKPGQAPRLFIY

SEQ ID NO: 1233 - DNA, 291 bp, synthetic construct
  source 1..291: mol_type = other DNA
gccaaaacgacacccccatctgtctatccactggcccctggatctgctgcccaaactaactccatggtgaccctgggatgcctggtcaagggctatttccctgagccagtgacagtgacctggaactctggatccctgtccagcggtgtgcacaccttcccagctgtcctgcagtctgacctctacactctgagcagctcagtgactgtcccctccagcacctggcccagcgagaccgtcacctgcaacgttgcccacccggccagcagcaccaaggtggacaagaaaatt

SEQ ID NO: 1234 - protein, 36 aa, synthetic construct
KRATGIPARFSGSGSGTDFTLTISSLEPEDFAVYYC

SEQ ID NO: 1235 - protein, 115 aa, synthetic construct
EVQLVESGGGLVQAGGSLRLSCAASGFTFSDYSMNWVRQAPGKGLEWVSYIRSSSSIIYYADSVKGRFTISRDNAKNSLHLQMNSLRDEDTAVYYCARRGHFDYWGQGTLVTVSS

SEQ ID NO: 1236 - protein, 107 aa, synthetic construct
EIVLTQSPATLSLSPGERATLSCRASQSVSDYLAWYQQKPGQAPRLFIYDVSKRATGIPARFSGSGSGTDFTLTISSLEPEDFAVYYCQQRSNWPLTFGGGTKVEIK

SEQ ID NO: 1237 - DNA, 345 bp, synthetic construct
  source 1..345: mol_type = other DNA
gaggtgcagctggtggagtctgggggaggcttggtacaggctggggggtccctgagactctcctgtgcagcctctggattcaccttcagtgactatagcatgaactgggtccgccaggctccagggaaggggctggagtgggtttcatatattaggagtagtagtagtatcatatactacgcagactctgtgaagggccgattcaccatctccagagacaatgccaagaactcactgcatttgcaaatgaacagcctgagagacgaggacacggctgtgtattactgtgcgagacggggtcactttgactactggggccagggaaccctggtcaccgtctcctca

SEQ ID NO: 1238 - DNA, 321 bp, synthetic construct
  source 1..321: mol_type = other DNA
gaaattgtgttgacacagtctccagccaccctgtctttgtctccaggggaaagagccaccctctcctgcagggccagtcagagtgttagcgactacttagcctggtaccaacagaaacctggccaggctcccaggctcttcatctatgatgtatccaagagggccactggcatcccagccaggttcagtggcagtgggtctgggacagacttcactctcaccatcagcagcctagagcctgaagattttgcagtttattactgtcagcagcgtagcaactggccgctcactttcggcggagggaccaaggtggagatcaaa

SEQ ID NO: 1239 - protein, 8 aa, synthetic construct
GFTFSSYT

SEQ ID NO: 1240 - protein, 8 aa, synthetic construct
ASLGRGDC

SEQ ID NO: 1241 - protein, 38 aa, synthetic construct
YYADSVKGRFTISRDNAKNSLYLQMNSLRDEDTAVYYC

SEQ ID NO: 1242 - protein, 36 aa, synthetic construct
KRFSGVPDRFSGSGAGTDFTLKISRVEAEDVGVYYC

SEQ ID NO: 1243 - protein, 10 aa, synthetic construct
FGQGTRLEIK

SEQ ID NO: 1244 - protein, 115 aa, synthetic construct
EVQLVESGGGLVQPGGSLRLSCAASGFTFSSYTMNWVRQAPGKGLEWVSYISSSSSTIYYADSVKGRFTISRDNAKNSLYLQMNSLRDEDTAVYYCASLGRGDCWGQGTLVTVSS

SEQ ID NO: 1245 - protein, 112 aa, synthetic construct
DIVMTQTPLSSPVTLGQPASISCRSSQSLVHSDGNTYLSWLQQRPGQPPRLLIYKISKRFSGVPDRFSGSGAGTDFTLKISRVEAEDVGVYYCMQATQFPRTFGQGTRLEIK

SEQ ID NO: 1246 - DNA, 345 bp, synthetic construct
  source 1..345: mol_type = other DNA
gaggtgcagctggtggagtctgggggaggcttggtacagcctggggggtccctgagactctcctgtgcagcctctggattcaccttcagtagttataccatgaactgggtccgccaggctccagggaaggggctggagtgggtttcatacattagtagtagtagtagtaccatatactacgcagactctgtgaagggccgattcaccatctccagagacaatgccaagaactcactgtatctgcaaatgaacagcctgagagacgaggacacggctgtgtattactgtgcgagtctggggagaggggactgctggggccagggaaccctggtcaccgtctcctca

SEQ ID NO: 1247 - DNA, 336 bp, synthetic construct
  source 1..336: mol_type = other DNA
gatattgtgatgacccagactccactctcctcacctgtcacccttggacagccggcctccatctcctgcaggtctagtcaaagcctcgtacacagtgatggaaacacctacttgagttggcttcagcagaggccaggccagcctccaagactcctaatttataagatttctaaacggttctctggggtcccagacagattcagtggcagtggggcagggacagatttcacactgaaaatcagcagggtggaagctgaggatgtcggggtttattactgcatgcaagctacacaatttcctcggaccttcggccaagggacacgactggagattaaa

SEQ ID NO: 1248 - protein, 7 aa, synthetic construct
IYTSGDT

SEQ ID NO: 1249 - protein, 15 aa, synthetic construct
ARAGIVGTPGLGMDV

SEQ ID NO: 1250 - protein, 17 aa, synthetic construct
WSWIRQPAGKGLEWIGR

SEQ ID NO: 1251 - protein, 38 aa, synthetic construct
YYNPSLQSRVTMSVDTSKNQFSLKLSAVTAADTAVYYC

SEQ ID NO: 1252 - protein, 11 aa, synthetic construct
WGQGTTVTVSS

SEQ ID NO: 1253 - protein, 6 aa, synthetic construct
ALPKQY

SEQ ID NO: 1254 - skipped

SEQ ID NO: 1255 - protein, 11 aa, synthetic construct
QSADSSGTYRV

SEQ ID NO: 1256 - protein, 25 aa, synthetic construct
SYELTQPPSVSVSPGQTARITCSGE

SEQ ID NO: 1257 - protein, 17 aa, synthetic construct
AYWYQQKPGQAPVLVIY

SEQ ID NO: 1258 - protein, 36 aa, synthetic construct
ERPSGIPERFSGSSSGTTVTLTISGVQAEDEADYYC

SEQ ID NO: 1259 - protein, 10 aa, synthetic construct
FGGGTKLTVL

SEQ ID NO: 1260 - protein, 121 aa, synthetic construct
QVQLQESGPGLVKPSETLSLTCTVSGGSISNYYWSWIRQPAGKGLEWIGRIYTSGDTYYNPSLQSRVTMSVDTSKNQFSLKLSAVTAADTAVYYCARAGIVGTPGLGMDVWGQGTTVTVSS

SEQ ID NO: 1261 - protein, 108 aa, synthetic construct
SYELTQPPSVSVSPGQTARITCSGEALPKQYAYWYQQKPGQAPVLVIYKDSERPSGIPERFSGSSSGTTVTLTISGVQAEDEADYYCQSADSSGTYRVFGGGTKLTVL

SEQ ID NO: 1262 - protein, 7 aa, synthetic construct
TLAVPFK

SEQ ID NO: 1263 - DNA, 363 bp, synthetic construct
  source 1..363: mol_type = other DNA
caggtgcagctgcaggagtcgggcccaggactggtgaagccttcggagaccctgtccctcacctgcactgtctctggtggctccatcagtaattactactggagttggatccggcagcccgccgggaagggtctggagtggattgggcgtatctataccagtggggacacctactacaacccctccctccagagtcgagtcaccatgtcagtagacacgtccaagaaccagttctccctgaagctgagcgctgtgaccgccgcggacacggccgtctattactgtgcgagagcgggtatagtgggaactccgggactcggtatggacgtctggggccaagggaccacggtcaccgtctcctca

SEQ ID NO: 1264 - DNA, 324 bp, synthetic construct
  source 1..324: mol_type = other DNA
tcctatgagctgacacagccaccctcggtgtcagtgtccccaggacagacggccaggatcacctgctctggagaagcattgccaaagcaatatgcttattggtaccagcagaagccaggccaggcccctgtgctggtgatatataaagacagtgagaggccctcagggatccctgagcgattctctggctccagctcagggacaacagtcacgttgaccatcagtggagtccaggcagaagatgaggctgactattactgtcaatcagcagacagcagtggtacttatcgggtgttcggcggagggaccaagctgaccgtccta

SEQ ID NO: 1265 - protein, 8 aa, synthetic construct
GFTFSSYR

SEQ ID NO: 1266 - protein, 8 aa, synthetic construct
ISSSRSAI

SEQ ID NO: 1267 - protein, 7 aa, synthetic construct
ATLGIGY

SEQ ID NO: 1268 - protein, 25 aa, synthetic construct
EVQMVESGGGLVQPGGSLTLSCAAS

SEQ ID NO: 1269 - protein, 9 aa, synthetic construct
MQVTQFPRT

SEQ ID NO: 1270 - protein, 36 aa, synthetic construct
NRFSGVPDRFSGSGAGTDFTLKITRVEAEDVGIYYC

SEQ ID NO: 1271 - protein, 10 aa, synthetic construct
FGQGTKVEIR

SEQ ID NO: 1272 - protein, 114 aa, synthetic construct
EVQMVESGGGLVQPGGSLTLSCAASGFTFSSYRMNWVRQAPGKGLEWVSYISSSRSAIYYADSVKGRFTISRDNAKNSLYLQMNSLRDEDTAVYYCATLGIGYWGQGTLVTVSS

SEQ ID NO: 1273 - protein, 112 aa, synthetic construct
DIVMTQTPLSSPVTLGQPASISCRSSQSLVHSDGNTYLSWLQQRPGQPPRLLIYKISNRFSGVPDRFSGSGAGTDFTLKITRVEAEDVGIYYCMQVTQFPRTFGQGTKVEIR

SEQ ID NO: 1274 - DNA, 342 bp, synthetic construct
  source 1..342: mol_type = other DNA
gaggtgcagatggtggagtctgggggaggcttggtacagcctggggggtccctgacactctcctgtgcagcctctggattcaccttcagtagctatagaatgaactgggtccgccaggctccagggaaggggctggagtgggtttcatacattagcagtagtagaagtgccatatactacgcagactctgtgaagggccgattcaccatctccagagacaatgccaagaactcactgtatctgcaaatgaacagcctgagagacgaggacacggctgtgtattactgtgcgaccctggggataggctactggggccagggaaccctggtcaccgtctcctca

SEQ ID NO: 1275 - DNA, 336 bp, synthetic construct
  source 1..336: mol_type = other DNA
gatattgtgatgacccagactccactctcctcacctgtcacccttggacagccggcctccatctcctgcaggtctagtcaaagcctcgtacacagtgatggaaacacctacttgagttggcttcagcagaggccaggccagcctccaagactcctaatttataagatttctaaccggttctctggggtcccagacagattcagtggcagtggggcagggacagatttcacactgaaaatcaccagggtggaggctgaggatgtcgggatttattactgcatgcaagttacacaatttcctcggacgttcggccaagggaccaaggtggaaatcaga

SEQ ID NO: 1276 - protein, 8 aa, synthetic construct
GFTFSSYS

SEQ ID NO: 1277 - protein, 8 aa, synthetic construct
ISRSGSTI

SEQ ID NO: 1278 - protein, 7 aa, synthetic construct
ARGNWAY

SEQ ID NO: 1279 - protein, 38 aa, synthetic construct
YYADSVEGRFTISRDNAYNSLYLQMISLRDDDTAVYYC

SEQ ID NO: 1280 - protein, 11 aa, synthetic construct
WGQGILVTVSS

SEQ ID NO: 1281 - protein, 9 aa, synthetic construct
SSNIGAGYD

SEQ ID NO: 1282 - protein, 11 aa, synthetic construct
QSYDSSLSGSV

SEQ ID NO: 1283 - protein, 25 aa, synthetic construct
QSVLTQPPSVSGAPGQRVTISCTGS

SEQ ID NO: 1284 - protein, 17 aa, synthetic construct
VHWYQQLPGTAPKLLIY

SEQ ID NO: 1285 - protein, 36 aa, synthetic construct
NRPSGVPDRFSGSKSGTSASLAITGLQAEDETDFYC

SEQ ID NO: 1286 - protein, 114 aa, synthetic construct
EVQLVESGGGLVQPGGSLRLSCAASGFTFSSYSMNWVRQAPGKGLEWVSYISRSGSTIYYADSVEGRFTISRDNAYNSLYLQMISLRDDDTAVYYCARGNWAYWGQGILVTVSS

SEQ ID NO: 1287 - protein, 111 aa, synthetic construct
QSVLTQPPSVSGAPGQRVTISCTGSSSNIGAGYDVHWYQQLPGTAPKLLIYGNSNRPSGVPDRFSGSKSGTSASLAITGLQAEDETDFYCQSYDSSLSGSVFGGGTKLTVL

SEQ ID NO: 1288 - DNA, 342 bp, synthetic construct
  source 1..342: mol_type = other DNA
gaggtgcagctggtggagtctgggggaggcttggtacagcctggggggtccctgagactctcctgtgcagcctctggattcaccttcagtagctatagcatgaactgggtccgccaggctccagggaaggggctggagtgggtttcatacattagtcgtagtggtagtaccatatactacgcagactctgtggagggccgattcaccatctccagagacaatgcctacaactcactgtatctgcaaatgatcagcctgagagacgatgacacggctgtgtattactgtgcgagagggaactgggcctactggggccagggaatcctggtcaccgtctcctca

SEQ ID NO: 1289 - DNA, 333 bp, synthetic construct
  source 1..333: mol_type = other DNA
cagtctgtgctgacgcagccgccctcagtgtctggggccccagggcagagggtcaccatctcctgcactgggagcagctccaacatcggggcaggttatgatgtacactggtaccagcagcttccaggaacagcccccaaactcctcatctatggtaacagcaatcggccctcaggggtccctgaccgattctctggctccaagtctggcacctcagcctccctggccatcactgggctccaggctgaggatgagactgatttttactgccagtcctatgacagcagcctgagtggttcggttttcggcggagggaccaagctgaccgtcctg

SEQ ID NO: 1290 - protein, 8 aa, synthetic construct
IRSSSSTI

SEQ ID NO: 1291 - protein, 8 aa, synthetic construct
ARRSIADY

SEQ ID NO: 1292 - protein, 38 aa, synthetic construct
YYADSVKGRFTISRDNAKKSLYLQMNSLRDEDTAVYYC

SEQ ID NO: 1293 - protein, 6 aa, synthetic construct
QSVTSY

SEQ ID NO: 1294 - protein, 9 aa, synthetic construct
QQRSNWPYT

SEQ ID NO: 1295 - protein, 26 aa, synthetic construct
EIVLTQSPATLSSSPGERATLSCRAS

SEQ ID NO: 1296 - protein, 17 aa, synthetic construct
LNWYQQKPGQAPRLLIY

SEQ ID NO: 1297 - protein, 36 aa, synthetic construct
NRATGIPARFSGSGSGTDFTLTISSLEPEDFALYYC

SEQ ID NO: 1298 - protein, 10 aa, synthetic construct
FGQGTKLEIK

SEQ ID NO: 1299 - protein, 115 aa, synthetic construct
EVQLVESGGGLVQPGGSLRLSCAASGFTFSSYSMNWVRQAPGKGLEWVSYIRSSSSTIYYADSVKGRFTISRDNAKKSLYLQMNSLRDEDTAVYYCARRSIADYWGQGTLVTVSS

SEQ ID NO: 1300 - protein, 107 aa, synthetic construct
EIVLTQSPATLSSSPGERATLSCRASQSVTSYLNWYQQKPGQAPRLLIYDASNRATGIPARFSGSGSGTDFTLTISSLEPEDFALYYCQQRSNWPYTFGQGTKLEIK

SEQ ID NO: 1301 - DNA, 345 bp, synthetic construct
  source 1..345: mol_type = other DNA
gaggtgcagttggtggagtctgggggaggcttggtacagcctggggggtccctgagactctcctgtgcagcctctggattcaccttcagtagctatagcatgaactgggtccgccaggctccagggaaggggctggagtgggtttcatacattaggagtagtagtagtaccatatactacgcagactctgtgaagggccgattcaccatctccagagacaatgccaagaaatcattgtatctgcaaatgaatagtctgagagacgaggacacggctgtgtattactgtgcgagaaggagtatagctgactactggggccagggaaccctggtcaccgtctcctca

SEQ ID NO: 1302 - DNA, 321 bp, synthetic construct
  source 1..321: mol_type = other DNA
gaaattgtgttgacacagtctccagccaccctgtcttcgtctccaggggaaagagccaccctctcctgcagggccagtcagagtgttaccagctacttaaactggtaccaacagaaacctggccaggctcccaggctcctcatctatgatgcatccaacagggccactggcatcccagccaggttcagtggcagtgggtctgggacagacttcactctcaccatcagcagcctcgagcctgaagattttgcactttattactgtcagcagcgtagcaactggccgtacacttttggccaggggaccaaactggagatcaaa

SEQ ID NO: 1303 - protein, 8 aa, synthetic construct
GFTYSSYA

SEQ ID NO: 1304 - protein, 8 aa, synthetic construct
ISGSSSIT

SEQ ID NO: 1305 - protein, 11 aa, synthetic construct
AKGGRYGYFQH

SEQ ID NO: 1306 - protein, 25 aa, synthetic construct
EVQLLESGGGLVQPGGSLRLSCAAS

SEQ ID NO: 1307 - protein, 17 aa, synthetic construct
MSWVRRAPGKGLEWISI

SEQ ID NO: 1308 - protein, 38 aa, synthetic construct
YYADSMKGRFTISRDNSKNTLFLQMNSLRAEDTAVYYC

SEQ ID NO: 1309 - protein, 6 aa, synthetic construct
NIGSKS

SEQ ID NO: 1310 - protein, 11 aa, synthetic construct
QVWDSSSDPVV

SEQ ID NO: 1311 - protein, 25 aa, synthetic construct
SYVLTQPPSVSVAPGQTARITCGGN

SEQ ID NO: 1312 - protein, 17 aa, synthetic construct
VHWYQQKPGQAPVLVVY

SEQ ID NO: 1313 - protein, 36 aa, synthetic construct
DRPSGIPERFSGSNSGNTATLTISRVEAGDEADYYC

SEQ ID NO: 1314 - protein, 10 aa, synthetic construct
FGGGTMLTVL

SEQ ID NO: 1315 - protein, 118 aa, synthetic construct
EVQLLESGGGLVQPGGSLRLSCAASGFTYSSYAMSWVRRAPGKGLEWISIISGSSSITYYADSMKGRFTISRDNSKNTLFLQMNSLRAEDTAVYYCAKGGRYGYFQHWGQGTLVTVSS

SEQ ID NO: 1316 - protein, 108 aa, synthetic construct
SYVLTQPPSVSVAPGQTARITCGGNNIGSKSVHWYQQKPGQAPVLVVYDDSDRPSGIPERFSGSNSGNTATLTISRVEAGDEADYYCQVWDSSSDPVVFGGGTMLTVL

SEQ ID NO: 1317 - DNA, 354 bp, synthetic construct
  source 1..354: mol_type = other DNA
gaggtgcagctgttggagtctgggggaggcttggtacagccgggggggtccctgagactctcctgtgcagcctcgggattcacctatagcagctatgccatgagctgggtccgccgggctccagggaaggggctggagtggatctcaattattagtggtagtagtagtatcacatactacgcagactccatgaagggccggttcactatctctagagacaattccaagaacacgctttttctgcaaatgaatagcctgagagccgaggacacggccgtttattactgtgcgaagggggggaggtacgggtacttccaacactggggccagggcaccctggtcaccgtctcctca

SEQ ID NO: 1318 - DNA, 324 bp, synthetic construct
  source 1..324: mol_type = other DNA
tcctatgtgctgactcagccaccctcggtgtcagtggccccaggacagacggccaggattacctgtgggggaaacaacattggaagtaaaagtgtgcactggtaccagcagaagccaggccaggcccctgtgctggtcgtctatgatgatagcgaccggccctcagggatccctgagcgattctctggctccaactctgggaacacggccaccctgaccatcagcagggtcgaagccggggatgaggccgactattactgtcaggtgtgggatagtagtagtgatcctgtggtattcggcggagggaccatgctgaccgtccta

SEQ ID NO: 1319 - protein, 10 aa, synthetic construct
GFSLSTSEVG

SEQ ID NO: 1320 - protein, 7 aa, synthetic construct
IYWNDHK

SEQ ID NO: 1321 - protein, 11 aa, synthetic construct
ARRVTGEGFDP

SEQ ID NO: 1322 - protein, 25 aa, synthetic construct
QITLKESGPTLVKPTQTLTLTCTLS

SEQ ID NO: 1323 - protein, 17 aa, synthetic construct
VGWIRQPPGKALEWLAI

SEQ ID NO: 1324 - protein, 38 aa, synthetic construct
RYSPSLKNRLTFTKDTSKNQVVLTMTNMDPVDTATYYC

SEQ ID NO: 1325 - protein, 10 aa, synthetic construct
QSADSSGSYV

SEQ ID NO: 1326 - protein, 25 aa, synthetic construct
SYELTQPPSVSVSPGQTARITCSGD

SEQ ID NO: 1327 - protein, 17 aa, synthetic construct
AYWYQQKPGQAPVLVIF

SEQ ID NO: 1328 - protein, 10 aa, synthetic construct
FGTGTKVTVL

SEQ ID NO: 1329 - protein, 119 aa, synthetic construct
QITLKESGPTLVKPTQTLTLTCTLSGFSLSTSEVGVGWIRQPPGKALEWLAIIYWNDHKRYSPSLKNRLTFTKDTSKNQVVLTMTNMDPVDTATYYCARRVTGEGFDPWGQGTLVTVSS

SEQ ID NO: 1330 - protein, 107 aa, synthetic construct
SYELTQPPSVSVSPGQTARITCSGDALPKQYAYWYQQKPGQAPVLVIFKDTERPSGIPERFSGSSSGTTVTLTISGVQAEDEADYYCQSADSSGSYVFGTGTKVTVL

SEQ ID NO: 1331 - DNA, 357 bp, synthetic construct
  source 1..357: mol_type = other DNA
cagatcaccttaaaggagtctggtcctacgctggtgaaacccacacagaccctcacgctgacctgcaccctctctgggttctcactcagcactagtgaagtgggtgtgggctggatccgtcagcccccaggaaaggccctggagtggcttgcaatcatttattggaatgatcataagcgctacagcccatctctgaagaacaggctcaccttcaccaaggacacctccaaaaaccaggtggtccttacaatgaccaacatggaccctgtggacacagccacatattattgtgcacgcagagtaactggggaggggttcgacccctggggccagggaaccctggtcaccgtctcctca

SEQ ID NO: 1332 - DNA, 321 bp, synthetic construct
  source 1..321: mol_type = other DNA
tcctatgagctgacacagccaccctcggtgtcagtgtccccaggacagacggccaggatcacctgctctggagatgcattgccaaagcaatatgcttattggtaccagcagaagccaggccaggcccctgtgctggtgatatttaaagacactgagaggccctcagggatccctgagcgattctctggctccagctcagggacaacagtcacgttgaccatcagtggagtccaggcagaagatgaggctgactattactgtcaatcagcagacagcagtggttcttatgtcttcggaactgggaccaaggtcaccgtccta

SEQ ID NO: 1333 - protein, 8 aa, synthetic construct
GFTFSTYS

SEQ ID NO: 1334 - protein, 8 aa, synthetic construct
ISSGSSYI

SEQ ID NO: 1335 - protein, 8 aa, synthetic construct
TVTTHFHH

SEQ ID NO: 1336 - protein, 25 aa, synthetic construct
EVQLVESGGGLVKPGGSLRLSCAAS

SEQ ID NO: 1337 - protein, 17 aa, synthetic construct
MNWVRQAPGKGLEWVSS

SEQ ID NO: 1338 - protein, 38 aa, synthetic construct
YYADSVKGRFTISRDNAKNSLYLQMNSLRAEDTAVYYC

SEQ ID NO: 1339 - protein, 11 aa, synthetic construct
QSLVYSDGNTY

SEQ ID NO: 1340 - protein, 9 aa, synthetic construct
MQGTHWPLT

SEQ ID NO: 1341 - protein, 26 aa, synthetic construct
DVVMTQSPLSLPVTLGQPASISCRSS

SEQ ID NO: 1342 - protein, 17 aa, synthetic construct
LNWFQQRPGQSPRRLIY

SEQ ID NO: 1343 - protein, 36 aa, synthetic construct
NRDSGVPDRFSGSGSGTDFTLKISRVEAEDVGVYYC

SEQ ID NO: 1344 - protein, 115 aa, synthetic construct
EVQLVESGGGLVKPGGSLRLSCAASGFTFSTYSMNWVRQAPGKGLEWVSSISSGSSYIYYADSVKGRFTISRDNAKNSLYLQMNSLRAEDTAVYYCTVTTHFHHWGQGTLVTVSS

SEQ ID NO: 1345 - protein, 112 aa, synthetic construct
DVVMTQSPLSLPVTLGQPASISCRSSQSLVYSDGNTYLNWFQQRPGQSPRRLIYKVSNRDSGVPDRFSGSGSGTDFTLKISRVEAEDVGVYYCMQGTHWPLTFGQGTRLEIK

SEQ ID NO: 1346 - DNA, 345 bp, synthetic construct
  source 1..345: mol_type = other DNA
gaggtgcagctggtggagtctgggggaggcctggtcaagcctggggggtccctgagactctcctgtgcagcctctggattcaccttcagtacctatagcatgaactgggtccgccaggctccagggaaggggctggagtgggtctcatccattagtagtggtagtagttacatatactacgcagactcagtgaagggccgattcaccatctccagagacaacgccaagaactcactgtatctgcaaatgaacagcctgagagccgaggacacggctgtgtattactgtacagtaactacacacttccaccactggggccagggcaccctggtcaccgtctcctca

SEQ ID NO: 1347 - DNA, 336 bp, synthetic construct
  source 1..336: mol_type = other DNA
gatgttgtgatgactcagtctccactctccctgcccgtcacccttggacagccggcctccatctcctgcaggtctagtcaaagcctcgtatacagtgatggaaacacctacttgaattggtttcagcagaggccaggccaatctccaaggcgcctaatttataaggtttctaaccgggactctggggtcccagacagattcagcggcagtgggtcaggcactgatttcacactaaaaatcagcagggtggaggctgaggatgttggggtttattactgcatgcaaggtacacactggcctctcaccttcggccaagggacacgactggagattaaa

SEQ ID NO: 1348 - protein, 9 aa, synthetic construct
SGINVGAYR

SEQ ID NO: 1349 - protein, 7 aa, synthetic construct
YKSDSDK

SEQ ID NO: 1350 - protein, 9 aa, synthetic construct
MIWHSSAWV

SEQ ID NO: 1351 - protein, 25 aa, synthetic construct
QAVLTQPSSLSASPGASARLTCTLR

SEQ ID NO: 1352 - protein, 17 aa, synthetic construct
LYWYQQKPGSPPQYLLR

SEQ ID NO: 1353 - protein, 38 aa, synthetic construct
QQGSGVPSRFSGSKDASANAGILLISGLQSEDEADYYC

SEQ ID NO: 1354 - protein, 115 aa, synthetic construct; identical to SEQ ID NO: 1344

SEQ ID NO: 1355 - protein, 115 aa, synthetic construct
QAVLTQPSSLSASPGASARLTCTLRSGINVGAYRLYWYQQKPGSPPQYLLRYKSDSDKQQGSGVPSRFSGSKDASANAGILLISGLQSEDEADYYCMIWHSSAWVFGGGTKLTVL

SEQ ID NO: 1356 - DNA, 345 bp, synthetic construct; identical to SEQ ID NO: 1346
  source 1..345: mol_type = other DNA

SEQ ID NO: 1357 - DNA, 345 bp, synthetic construct
  source 1..345: mol_type = other DNA
caggctgtgctgactcagccgtcttccctctctgcatctcctggagcatcagccagactcacctgcaccttgcgcagtggcatcaatgttggtgcctacaggctatactggtaccagcagaagccaggaagtcctccccagtatctcctgaggtacaaatcagactcagataagcagcagggctctggagtccccagccgcttctctggatccaaagatgcttcggccaatgcagggattttactcatctctgggctccagtctgaggatgaggctgactattactgtatgatttggcacagcagcgcttgggtgttcggcggagggaccaagctgaccgtccta

SEQ ID NO: 1358 - protein, 8 aa, synthetic construct
GFTFSSYN

SEQ ID NO: 1359 - protein, 8 aa, synthetic construct
ISSSSNTI

SEQ ID NO: 1360 - protein, 7 aa, synthetic construct
ATLGRGY

SEQ ID NO: 1361 - protein, 38 aa, synthetic construct
YYADSVKGRFTVSRDNAKNSLYLQMNSLRDEDTAVYYC

SEQ ID NO: 1362 - protein, 11 aa, synthetic construct
WGQGTLVIASS

SEQ ID NO: 1363 - protein, 26 aa, synthetic construct
DVVMTQTPLSSPVTLGQPASISCRSS

SEQ ID NO: 1364 - protein, 114 aa, synthetic construct
EVQLVESGGGLVQPGGSLRLSCAASGFTFSSYNMNWVRQAPGKGLEWISYISSSSNTIYYADSVKGRFTVSRDNAKNSLYLQMNSLRDEDTAVYYCATLGRGYWGQGTLVIASS

SEQ ID NO: 1365 - protein, 112 aa, synthetic construct
DVVMTQTPLSSPVTLGQPASISCRSSQSLVHSDGNTYLSWLQQRPGQPPRLLIYKISNRFSGVPDRFSGSGAGTDFTLKISRVEAEDVGVYYCMQATQFPRTFGQGTKLEIK

SEQ ID NO: 1366 - DNA, 342 bp, synthetic construct
  source 1..342: mol_type = other DNA
gaggtgcaactggtggagtctgggggaggcttggtacagcctggggggtccctgagactctcctgtgcagcctctggattcaccttcagtagctataacatgaactgggttcgccaggctccagggaaggggctggagtggatttcatacattagtagtagtagtaataccatatactacgcagactctgtgaagggccgattcaccgtctccagggacaatgccaagaactcactgtatctgcaaatgaacagcctgagagacgaggacacggctgtgtattactgtgcgactctggggaggggctactggggccagggaaccctggtcatcgcctcctca

SEQ ID NO: 1367 - DNA, 336 bp, synthetic construct
  source 1..336: mol_type = other DNA
gatgttgtgatgacccagactccactctcctcacctgtcacccttggacagccggcctccatctcctgcaggtctagtcaaagcctcgtacacagtgatggaaacacctacttgagttggcttcagcagaggccaggccagcctccaagactcctaatttataagatttctaaccggttctctggggtcccagacagattcagtggcagtggggcagggacagatttcacactgaaaatcagcagggtggaagctgaggatgtcggggtttattactgcatgcaagctacacaatttcctcgcacttttggccaggggaccaagctggagatcaaa

SEQ ID NO: 1368 - protein, 8 aa, synthetic construct
GGSISSYY

SEQ ID NO: 1369 - protein, 7 aa, synthetic construct
IDTSGST

SEQ ID NO: 1370 - protein, 9 aa, synthetic construct
ARGGDGYRY

SEQ ID NO: 1371 - protein, 38 aa, synthetic construct
NYNPSLKSRVTMSIDTSKKQFSLKLSSVTAADTAVYYC

SEQ ID NO: 1372 - protein, 10 aa, synthetic construct
QSTDSSGSWV

SEQ ID NO: 1373 - protein, 17 aa, synthetic construct
ACWYQQKPGQAPVLVIY

SEQ ID NO: 1374 - protein, 36 aa, synthetic construct
ERPSGIPERFSGSSSGTTVTLTITGVQAEDEADYYC

SEQ ID NO: 1375 - protein, 115 aa, synthetic construct
QVQLQESGPGLVKPSETLSLTCTVSGGSISSYYWTWIRQPAGKGLEWIGRIDTSGSTNYNPSLKSRVTMSIDTSKKQFSLKLSSVTAADTAVYYCARGGDGYRYWGQGTLVTVSS

SEQ ID NO: 1376 - protein, 107 aa, synthetic construct
SYELTQPPSVSVSPGQTARITCSGDALPKQYACWYQQKPGQAPVLVIYKDSERPSGIPERFSGSSSGTTVTLTITGVQAEDEADYYCQSTDSSGSWVFGGGTKLTVL

SEQ ID NO: 1377 - DNA, 345 bp, synthetic construct
  source 1..345: mol_type = other DNA
caggtgcagctgcaggagtcgggcccaggactggtgaagccttcggagaccctgtccctcacctgcactgtctctggtggctccatcagtagttactactggacctggatccggcagcccgccgggaagggactggagtggattgggcgtatcgataccagtgggagcaccaactacaacccctccctcaagagtcgagtcaccatgtcaatagacacgtccaagaaacagttctccctgaagctgagctctgtgaccgccgcggacacggccgtgtattactgtgcgagagggggagatggctaccgctactggggccagggaaccctggtcaccgtctcctca

SEQ ID NO: 1378 - DNA, 321 bp, synthetic construct
  source 1..321: mol_type = other DNA
tcctatgagctgacacagccaccctcggtgtcagtgtccccaggacagacggccaggatcacctgctctggagatgcattgccaaagcaatatgcttgttggtaccagcagaagccaggccaggcccctgtgctggtgatatataaagacagtgagaggccctcagggatccctgagcgattctctggctccagctcagggacaacagtcacgttgaccatcactggagtccaggcagaagatgaggctgactattactgtcaatccacagacagcagtggttcttgggtgttcggcggagggaccaagctgaccgtccta

SEQ ID NO: 1379 - protein, 8 aa, synthetic construct
ISSSNSTI

SEQ ID NO: 1380 - protein, 8 aa, synthetic construct
ARRSLGDY

SEQ ID NO: 1381 - protein, 38 aa, synthetic construct
KYADSVKGRFTISRDNAKNSLYLQMNSLRDEDTAVYYC

SEQ ID NO: 1382 - protein, 11 aa, synthetic construct
WGQGTLVIVSS

SEQ ID NO: 1383 - protein, 6 aa, synthetic construct
QSVSSY

SEQ ID NO: 1384 - protein, 9 aa, synthetic construct
QQRRNWPYT

SEQ ID NO: 1385 - protein, 17 aa, synthetic construct
LAWYLQKPGQAPRLLIY

SEQ ID NO: 1386 - protein, 36 aa, synthetic construct
NRATGIPARFSGSGSGTDFTLTISRLEPEDFAVYYC

SEQ ID NO: 1387 - protein, 115 aa, synthetic construct
EVQLVESGGGLVQPGGSLRLSCAASGFTFSSYSMNWVRQAPGKGLEWISYISSSNSTIKYADSVKGRFTISRDNAKNSLYLQMNSLRDEDTAVYYCARRSLGDYWGQGTLVIVSS

SEQ ID NO: 1388 - protein, 107 aa, synthetic construct
EIVLTQSPATLSLSPGERATLSCRASQSVSSYLAWYLQKPGQAPRLLIYDVSNRATGIPARFSGSGSGTDFTLTISRLEPEDFAVYYCQQRRNWPYTFGQGTKLEIK

SEQ ID NO: 1389 - DNA, 345 bp, synthetic construct
  source 1..345: mol_type = other DNA
gaggtgcagctggtggagtctgggggaggcttggtacagcctggggggtccctgagactctcctgtgcagcctctggattcaccttcagtagctatagcatgaactgggtccgccaggctccagggaaggggctggagtggatttcatacattagtagtagtaatagtaccataaagtacgcagactctgtgaagggccgattcaccatctccagagacaatgccaagaactcactgtatctgcaaatgaacagcctgagagacgaggacacggctgtgtattactgtgcgagaaggagtctaggtgactactggggccagggaaccctggtcatcgtctcctca

SEQ ID NO: 1390 - DNA, 321 bp, synthetic construct
  source 1..321: mol_type = other DNA
gaaattgtgttgacacagtctccagccaccctgtctttgtctccaggggaaagagccaccctctcctgcagggccagtcagagtgttagcagctacttagcctggtacctacagaaacctggccaggctcccaggctcctcatctatgatgtgtccaacagggccactggcatcccagccaggttcagtggcagtgggtctgggacagacttcactctcaccatcagcagactagagcctgaagattttgcagtttattactgtcagcagcgtcgcaactggccgtacacttttggccaggggaccaagctggagatcaaa

SEQ ID NO: 1391 - protein, 6 aa, synthetic construct
QGISCS

SEQ ID NO: 1392 - protein, 9 aa, synthetic construct
QQFNSYPFT

SEQ ID NO: 1393 - protein, 26 aa, synthetic construct
DIQLTQSPSFLSASVGDRVTITCRAS

SEQ ID NO: 1394 - protein, 17 aa, synthetic construct
LAWYQQKPGKAPKLLIY

SEQ ID NO: 1395 - protein, 36 aa, synthetic construct
TLQSGVPSRFSGSGSGTEFTLTISSLQPEDFATYYC

SEQ ID NO: 1396 - protein, 10 aa, synthetic construct
FGPGTKVDIK

SEQ ID NO: 1397 - protein, 115 aa, synthetic construct; identical to SEQ ID NO: 1387

SEQ ID NO: 1398 - protein, 107 aa, synthetic construct
DIQLTQSPSFLSASVGDRVTITCRASQGISCSLAWYQQKPGKAPKLLIYAASTLQSGVPSRFSGSGSGTEFTLTISSLQPEDFATYYCQQFNSYPFTFGPGTKVDIK

SEQ ID NO: 1399 - DNA, 345 bp, synthetic construct; identical to SEQ ID NO: 1389
  source 1..345: mol_type = other DNA

SEQ ID NO: 1400 - DNA, 321 bp, synthetic construct
  source 1..321: mol_type = other DNA
gacatccagttgacccagtctccatccttcctgtctgcatctgtaggagacagagtcaccatcacttgccgggccagtcagggcattagctgttctttagcctggtatcagcaaaaaccagggaaagcccctaagctcctgatctatgctgcatccactttgcaaagtggggtcccatcaaggttcagcggcagtggatctgggacagaattcactctcacaatcagcagcctgcagcctgaagattttgcaacttattactgtcaacagtttaatagttacccattcactttcggccctgggaccaaagtggatatcaaa

SEQ ID NO: 1401 - protein, 8 aa, synthetic construct
GFTFSNAW

SEQ ID NO: 1402 - protein, 10 aa, synthetic construct
IKSKTDGGTT

SEQ ID NO: 1403 - protein, 8 aa, synthetic construct
VTDYPKDV

SEQ ID NO: 1404 - protein, 17 aa, synthetic construct
MSWVRQAPGKGLEWFGR

SEQ ID NO: 1405 - protein, 38 aa, synthetic construct
DYAAPVKGRFTISRDDSKNTLYLQMNSLKTEDTAVYYC

SEQ ID NO: 1406 - protein, 12 aa, synthetic construct
QSVLYSSKNKNY

SEQ ID NO: 1407 - protein, 9 aa, synthetic construct
QQYYSSPYT

SEQ ID NO: 1408 - protein, 26 aa, synthetic construct
DIVMTQSPDSLAVSLGERATINCKSS

SEQ ID NO: 1409 - protein, 17 aa, synthetic construct
LAWYQQKPGQPPKLLIY

SEQ ID NO: 1410 - protein, 36 aa, synthetic construct
TRESGVPDRFSGSGSGTDFTLAISSLQAEDVAVYYC

SEQ ID NO: 1411 - protein, 117 aa, synthetic construct
EVQLVESGGGLVKPGGSLRLSCAASGFTFSNAWMSWVRQAPGKGLEWFGRIKSKTDGGTTDYAAPVKGRFTISRDDSKNTLYLQMNSLKTEDTAVYYCVTDYPKDVWGQGTTVTVSS

SEQ ID NO: 1412 - protein, 113 aa, synthetic construct
DIVMTQSPDSLAVSLGERATINCKSSQSVLYSSKNKNYLAWYQQKPGQPPKLLIYWASTRESGVPDRFSGSGSGTDFTLAISSLQAEDVAVYYCQQYYSSPYTFGQGTKLEIK

SEQ ID NO: 1413 - DNA, 351 bp, synthetic construct
  source 1..351: mol_type = other DNA
gaggtgcagctggtggagtctgggggaggcttggtaaagcctggggggtcccttagactctcctgtgcagcctctggattcactttcagtaacgcctggatgagctgggtccgccaggctccagggaaggggctggagtggtttggccgtattaaaagcaaaactgatggtgggacaacagactacgctgcacccgtgaaaggcagattcaccatctcaagagatgactcaaaaaacacgctgtatctgcaaatgaacagcctgaaaaccgaggacacagccgtgtattactgtgtcacagattacccgaaggacgtctggggccaagggaccacggtcaccgtctcctca

SEQ ID NO: 1414 - DNA, 339 bp, synthetic construct
  source 1..339: mol_type = other DNA
gacatcgtgatgacccagtctccagactccctggctgtgtctctgggcgagagggccaccatcaactgcaagtccagccagagtgttttatacagctccaaaaataagaactacttagcttggtaccagcagaaaccaggacagcctcctaagctgctcatttactgggcatctacccgggaatccggggtccctgaccgattcagtggcagcgggtctgggacagatttcactctcgccatcagcagcctgcaggctgaagatgtggcagtttattactgtcagcaatattatagtagtccgtacacttttggccaggggaccaagctggagatcaaa

SEQ ID NO: 1415 - protein, 8 aa, synthetic construct
GFTFNNYD

SEQ ID NO: 1416 - protein, 7 aa, synthetic construct
IGAAGDT

SEQ ID NO: 1417 - protein, 20 aa, synthetic construct
ARAGETLEGATIGYYYGMDV

SEQ ID NO: 1418 - protein, 17 aa, synthetic construct
MHWVRQAAGKGLEWVST

SEQ ID NO: 1419 - protein, 38 aa, synthetic construct
YYPGSVKGRFIISRENAKNSLYLQMNSLRAGDTAVYYC

SEQ ID NO: 1420 - protein, 11 aa, synthetic construct
QSLLHSNGYNY

SEQ ID NO: 1421 - protein, 9 aa, synthetic construct
MQALQIPLT

SEQ ID NO: 1422 - protein, 26 aa, synthetic construct
DILMTQSPLSLPVTPGEPASISCRSS

SEQ ID NO: 1423 - protein, 17 aa, synthetic construct
LDWYLQKPGQSPQLLIY

SEQ ID NO: 1424 - protein, 36 aa, synthetic construct
NRASGVPDRFSGSGSGTDFTLKFSRVEAEDVGLYYC

SEQ ID NO: 1425 - protein, 126 aa, synthetic construct
EVQLVESGGGLVQPGGSLRLSCAASGFTFNNYDMHWVRQAAGKGLEWVSTIGAAGDTYYPGSVKGRFIISRENAKNSLYLQMNSLRAGDTAVYYCARAGETLEGATIGYYYGMDVWGQGTTVTVSS

SEQ ID NO: 1426 - protein, 112 aa, synthetic construct
DILMTQSPLSLPVTPGEPASISCRSSQSLLHSNGYNYLDWYLQKPGQSPQLLIYLGSNRASGVPDRFSGSGSGTDFTLKFSRVEAEDVGLYYCMQALQIPLTFGGGTKVEIK

SEQ ID NO: 1427 - DNA, 378 bp, synthetic construct
  source 1..378: mol_type = other DNA
gaggtgcagctggtggagtctgggggaggcttggtacagcctggggggtccctgagactctcctgtgcagcctctggattcaccttcaataactacgacatgcactgggtccgccaagctgcaggaaaaggtctggagtgggtctcaactattggtgctgctggtgacacatattatccaggctccgtgaagggccgattcatcatctccagagaaaatgccaagaactccttgtatcttcaaatgaacagcctgagagccggggacacggctgtgtattactgtgcaagagccggagagaccttagagggagctactatcggctactactacggtatggacgtctggggccaggggaccacggtcaccgtctcctca

SEQ ID NO: 1428 - DNA, 336 bp, synthetic construct
  source 1..336: mol_type = other DNA
gatattctgatgactcagtctccactctccctgcccgtcacccctggagagccggcctccatctcctgcaggtctagtcagagcctcctgcatagtaatggatacaactatttggattggtacctgcagaagccagggcagtctccacagctcctgatctatttgggttctaatcgggcctccggggtccctgacaggttcagtggcagtggatcaggcacagattttacactgaaattcagcagagtggaggctgaggatgttggactttattactgcatgcaagctctacaaattccgctcactttcggcggagggaccaaggtggagatcaaa

SEQ ID NO: 1429 - protein, 8 aa, synthetic construct
GYTFTGYY

SEQ ID NO: 1430 - protein, 8 aa, synthetic construct
INPNSGGT

SEQ ID NO: 1431 - protein, 7 aa, synthetic construct
AGDAFDI

SEQ ID NO: 1432 - protein, 25 aa, synthetic construct [sequence omitted]

SEQ ID NO: 1433 - protein, 17 aa, synthetic construct
MHWVRQAPGQGLEWMGW

SEQ ID NO: 1434 - protein, 38 aa, synthetic construct
NYAQKFQGRVTMTRDTSISTAYMELSRLRSDDTAVYYC

SEQ ID NO: 1435 - protein, 11 aa, synthetic construct
WGQGTMVTVSS

SEQ ID NO: 1436 - protein, 12 aa, synthetic construct
QSVLYSSNNKNY

SEQ ID NO: 1437 - protein, 9 aa, synthetic construct
QQYYSTPLT

SEQ ID NO: 1438 - protein, 36 aa, synthetic construct
TRESGVPDRFSGSGSGTDFTLTISSLQAEDVAVYYC

SEQ ID NO: 1439 - protein, 114 aa, synthetic construct
QVQLVQSGAEVKKPGASVKVSCKASGYTFTGYYMHWVRQAPGQGLEWMGWINPNSGGTNYAQKFQGRVTMTRDTSISTAYMELSRLRSDDTAVYYCAGDAFDIWGQGTMVTVSS

SEQ ID NO: 1440 - protein, 113 aa, synthetic construct
DIVMTQSPDSLAVSLGERATINCKSSQSVLYSSNNKNYLAWYQQKPGQPPKLLIYWASTRESGVPDRFSGSGSGTDFTLTISSLQAEDVAVYYCQQYYSTPLTFGGGTKVEIK

SEQ ID NO: 1441 - DNA, 342 bp, synthetic construct
  source 1..342: mol_type = other DNA
caggtgcagctggtgcagtctggggctgaggtgaagaagcctggggcctcagtgaaggtctcctgcaaggcttctggatacaccttcaccggctactatatgcactgggtgcgacaggcccctggacaagggcttgagtggatgggatggatcaaccctaacagtggtggcacaaactatgcacagaagtttcagggcagggtcaccatgaccagggacacgtccatcagcacagcctacatggagctgagcaggctgagatctgacgacacggccgtgtattactgtgctggggatgcttttgatatctggggccaagggacaatggtcaccgtctcttca

SEQ ID NO: 1442 - DNA, 339 bp, synthetic construct
  source 1..339: mol_type = other DNA
gacatcgtgatgacccagtctccagactccctggctgtgtctctgggcgagagggccaccatcaactgcaagtccagccagagtgttttatacagctccaacaataagaactacttagcttggtaccagcagaaaccaggacagcctcctaagctgctcatttactgggcatctacccgggaatccggggtccctgaccgattcagtggcagcgggtctgggacagatttcactctcaccatcagcagcctgcaggctgaagatgtggcagtttattactgtcagcaatattatagtactccgctcactttcggcggagggaccaaggtggagatcaaa

SEQ ID NO: 1443 - protein, 10 aa, synthetic construct
GFSLINARMA

SEQ ID NO: 1444 - protein, 7 aa, synthetic construct
IFSNDEK

SEQ ID NO: 1445 - protein, 14 aa, synthetic construct
ARIRGYSYNYGMDV

SEQ ID NO: 1446 - protein, 25 aa, synthetic construct
QVTLKESGPVLVKPTETLTLTCTVS

SEQ ID NO: 1447 - protein, 17 aa, synthetic construct
VSWIRQPPGKALEWLAH

SEQ ID NO: 1448 - protein, 38 aa, synthetic construct
SYSTSLKSRLTISKDTSKSQVVLIMTNMDPVDTATYYC

SEQ ID NO: 1449 - protein, 11 aa, synthetic construct
QSLLHSNGYIY

SEQ ID NO: 1450 - protein, 9 aa, synthetic construct
MQTLQIPRT

SEQ ID NO: 1451 - protein, 26 aa, synthetic construct
DIVMTQSPLSLPVIPGEPASISCRSS

SEQ ID NO: 1452 - protein, 36 aa, synthetic construct
NRASGVPDRFSGSGSGTDFKLKISRVEAEDVGVYYC

SEQ ID NO: 1453 - protein, 122 aa, synthetic construct
QVTLKESGPVLVKPTETLTLTCTVSGFSLINARMAVSWIRQPPGKALEWLAHIFSNDEKSYSTSLKSRLTISKDTSKSQVVLIMTNMDPVDTATYYCARIRGYSYNYGMDVWGQGTTVTVSS

SEQ ID NO: 1454 - protein, 112 aa, synthetic construct
DIVMTQSPLSLPVIPGEPASISCRSSQSLLHSNGYIYLDWYLQKPGQSPQLLIYVGSNRASGVPDRFSGSGSGTDFKLKISRVEAEDVGVYYCMQTLQIPRTFGGGTKVEIK

SEQ ID NO: 1455 - DNA, 366 bp, synthetic construct
  source 1..366: mol_type = other DNA
caggtcaccttgaaggagtctggtcctgtgctggtgaaacccacagagaccctcacgctgacctgcaccgtctctgggttctcactcatcaatgctagaatggctgtgagctggatccgtcagcccccagggaaggccctggagtggcttgcacacattttttcgaatgacgaaaaatcctacagcacatctctgaagagcagactcaccatctccaaggacacctccaaaagccaggtggtccttatcatgaccaacatggaccctgtggacacagccacatattactgtgcacggatccgtggatacagctataactacggtatggacgtctggggccaagggaccacggtcaccgtctcctca

SEQ ID NO: 1456 - DNA, 336 bp, synthetic construct
  source 1..336: mol_type = other DNA
gatattgtgatgactcagtctccactctccctgcccgtcatccctggagagccggcctccatctcctgcaggtctagtcagagcctcctgcatagtaatggatacatctatttggattggtacctgcagaagccagggcagtctccacagctcctgatctatgtgggttctaatcgggcctccggggtccctgacaggttcagtggcagtggatcaggcacagatttcaaactgaaaatcagcagagtggaggctgaggatgttggggtttattactgcatgcaaactctacaaattccgcgcactttcggcggagggaccaaggtggagatcaaa

SEQ ID NO: 1457 - protein, 324 aa, synthetic construct
AKTTPPSVYPLAPGSAAQTNSMVTLGCLVKGYFPEPVTVTWNSGSLSSGVHTFPAVLQSDLYTLSSSVTVPSSPRPSETVTCNVAHPASSTKVDKKIVPRDCGCKPCICTVPEVSSVFIFPPKPKDVLTITLTPKVTCVVVDISKDDPEVQFSWFVDDVEVHTAQTQPREEQFNSTFRSVSELPIMHQDWLNGKEFKCRVNSAAFPAPIEKTISKTKGRPKAPQVYTIPPPKEQMAKDKVSLTCMITDFFPEDITVEWQWNGQPAENYKNTQPIMNTNGSYFVYSKLNVQKSNWEAGNTFTCSVLHEGLHNHHTEKSLSHSPGK

SEQ ID NO: 1458 - protein, 393 aa, synthetic construct
AKTTPPSVYPLAPGSAAQTNSMVTLGCLVKGYFPEPVTVTWNSGSLSSGVHTFPAVLQSDLYTLSSSVTVPSSPRPSETVTCNVAHPASSTKVDKKIVPRDCGCKPCICTVPEVSSVFIFPPKPKDVLTITLTPKVTCVVVDISKDDPEVQFSWFVDDVEVHTAQTQPREEQFNSTFRSVSELPIMHQDWLNGKEFKCRVNSAAFPAPIEKTISKTKGRPKAPQVYTIPPPKEQMAKDKVSLTCMITDFFPEDITVEWQWNGQPAENYKNTQPIMNTNGSYFVYSKLNVQKSNWEAGNTFTCSVLHEGLHNHHTEKSLSHSPGLQLDETCAEAQDGELDGLWTTITIFISLFLLSVCYSAAVTLFKVKWIFSSVVELKQTLVPEYKNMIGQAP

SEQ ID NO: 1459 - protein, 330 aa, synthetic construct
AKTTAPSVYPLAPVCGDTTGSSVTLGCLVKGYFPEPVTLTWNSGSLSSGVHTFPAVLQSDLYTLSSSVTVTSSTWPSQSITCNVAHPASSTKVDKKIEPRGPTIKPCPPCKCPAPNLLGGPSVFIFPPKIKDVLMISLSPIVTCVVVDVSEDDPDVQISWFVNNVEVHTAQTQTHREDYNSTLRVVSALPIQHQDWMSGKEFKCKVNNKDLPAPIERTISKPKGSVRAPQVYVLPPPEEEMTKKQVTLTCMVTDFMPEDIYVEWTNNGKTELNYKNTEPVLDSDGSYFMYSKLRVEKKNWVERNSYSCSVVHEGLHNHHTTKSFSRTPGK

SEQ ID NO: 1460 - DNA, 990 bp, synthetic construct
  source 1..990: mol_type = other DNA
gctaaaacaacagccccatcggtctatccactggcccctgtgtgtggagatacaactggctcctcggtgactctaggatgcctggtcaagggttatttccctgagccagtgaccttgacctggaactctggatccctgtccagtggtgtgcacaccttcccagctgtcctgcagtctgacctctacaccctcagcagctcagtgactgtaacctcgagcacctggcccagccagtccatcacctgcaatgtggcccacccggcaagcagcaccaaggtggacaagaaaattgagcccagagggcccacaatcaagccctgtcctccatgcaaatgcccagcacctaacctcttgggtggaccatccgtcttcatcttccctccaaagatcaaggatgtactcatgatctccctgagccccatagtcacatgtgtggtggtggatgtgagcgaggatgacccagatgtccagatcagctggtttgtgaacaacgtggaagtacacacagctcagacacaaacccatagagaggattacaacagtactctccgggtggtcagtgccctccccatccagcaccaggactggatgagtggcaaggagttcaaatgcaaggtcaacaacaaagacctcccagcgcccatcgagagaaccatctcaaaacccaaagggtcagtaagagctccacaggtatatgtcttgcctccaccagaagaagagatgactaagaaacaggtcactctgacctgcatggtcacagacttcatgcctgaagacatttacgtggagtggaccaacaacgggaaaacagagctaaactacaagaacactgaaccagtcctggactctgatggttcttacttcatgtacagcaagctgagagtggaaaagaagaactgggtggaaagaaatagctactcctgttcagtggtccacgagggtctgcacaatcaccacacgactaagagcttctcccggactccgggtaaa

SEQ ID NO: 1461 - protein, 335 aa, synthetic construct
AKTTAPSVYPLVPVCGGTTGSSVTLGCLVKGYFPEPVTLTWNSGSLSSGVHTFPALLQSGLYTLSSSVTVTSNTWPSQTITCNVAHPASSTKVDKKIEPRVPITQNPCPPHQRVPPCAAPDLLGGPSVFIFPPKIKDVLMISLSPMVTCVVVDVSEDDPDVQISWFVNNVEVHTAQTQTHREDYNSTLRVVSALPIQHQDWMSGKEFKCKVNNRALPSPIEKTISKPRGPVRAPQVYVLPPPAEEMTKKEFSLTCMITGFLPAEIAVDWTSNGRTEQNYKNTATVLDSDGSYFMYSKLRVQKSTWERGSLFACSVVHEVLHNHLTTKTISRSLGK

SEQ ID NO: 1462 - protein, 404 aa, synthetic construct
KTTPPSVYPLAPGCGDTTGSSVTLGCLVKGYFPESVTVTWNSGSLSSSVHTFPALLQSGLYTMSSSVTVPSSTWPSQTVTCSVAHPASSTTVDKKLEPSGPISTINPCPPCKECHKCPAPNLEGGPSVFIFPPNIKDVLMISLTPKVTCVVVDVSEDDPDVQISWFVNNVEVHTAQTQTHREDYNSTIRVVSTLPIQHQDWMSGKEFKCKVNNKDLPSPIERTISKIKGLVRAPQVYILPPPAEQLSRKDVSLTCLVVGFNPGDISVEWTSNGHTEENYKDTAPVLDSDGSYFIYSKLNMKTSKWEKTDSFSCNVRHEGLKNYYLKKTISRSPGLDLDDICAEAKDGELDGLWTTITIFISLFLLSVCYSASVTLFKVKWIFSSVVELKQKISPDYRNMIGQGA

SEQ ID NO: 1463 - protein, 403 aa, synthetic construct
KTTAPSVYPLAPVCGGTTGSSVTLGCLVKGYFPEPVTLTWNSGSLSSGVHTFPALLQSGLYTLSSSVTVTSNTWPSQTITCNVAHPASSTKVDKKIEPRVPITQNPCPPLKECPPCAAPDLLGGPSVFIFPPKIKDVLMISLSPMVTCVVVDVSEDDPDVQISWFVNNVEVHTAQTQTHREDYNSTLRVVSALPIQHQDWMSGKEFKCKVNNRALPSPIEKTISKPRGPVRAPQVYVLPPPAEEMTKKEFSLTCMITGFLPAEIAVDWTSNGRTEQNYKNTATVLDSDGSYFMYSKLRVQKSTWERGSLFACSVVHEGLHNHLTTKTISRSLGLDLDDVCTEAQDGELDGLWTTITIFISLFLLSVCYSASVTLFKVKWIFSSVVELKQKISPDYRNMIGQGA

SEQ ID NO: 1464 - protein, 398 aa, synthetic construct
TTTAPSVYPLVPGCSDTSGSSVTLGCLVKGYFPEPVTVKWNYGALSSGVRTVSSVLQSGFYSLSSLVTVPSSTWPSQTVICNVAHPASKTELIKRIEPRIPKPSTPPGSSCPPGNILGGPSVFIFPPKPKDALMISLTPKVTCVVVDVSEDDPDVHVSWFVDNKEVHTAWTQPREAQYNSTFRVVSALPIQHQDWMRGKEFKCKVNNKALPAPIERTISKPKGRAQTPQVYTIPPPREQMSKKKVSLTCLVTNFFSEAISVEWERNGELEQDYKNTPPILDSDGTYFLYSKLTVDTDSWLQGEIFTCSVVHEALHNHHTQKNLSRSPELELNETCAEAQDGELDGLWTTITIFISLFLLSVCYSASVTLFKVKWIFSSVVQVKQTAIPDYRNMIGQGA

SEQ ID NO: 1465 - protein, 106 aa, synthetic construct
ADAAPTVSIFPPSSEQLTSGGASVVCFLNNFYPKDINVKWKIDGSERQNGVLNSWTDQDSKDSTYSMSSTLTLTKDEYERHNSYTCEATHKTSTSPIVKSFNRNEC

SEQ ID NO: 1466 - DNA, 318 bp, synthetic construct
  source 1..318: mol_type = other DNA
gcagatgctgcaccaactgtatccatcttcccaccatccagtgagcagttaacatctggaggtgcctcagtcgtgtgcttcttgaacaacttctaccccaaagacatcaatgtcaagtggaagattgatggcagtgaacgacaaaatggcgtcctgaacagttggactgatcaggacagcaaagacagcacctacagcatgagcagcaccctcacgttgaccaaggacgagtatgaacgacataacagctatacctgtgaggccactcacaagacatcaacttcacccattgtcaagagcttcaacaggaatgagtgt

SEQ ID NO: 1467 - protein, 105 aa, synthetic construct
QPKSSPSVTLFPPSSEELETNKATLVCTITDFYPGVVTVDWKVDGTPVTQGMETTQPSKQSNNKYMASSYLTLTARAWERHSSYSCQVTHEGHTVEKSLSRADCS

SEQ ID NO: 1468 - protein, 104 aa, synthetic construct
QPKSTPTLTVFPPSSEELKENKATLVCLISNFSPSGVTVAWKANGTPITQGVDTSNPTKEGNKFMASSFLHLTSDQWRSHNSFTCQVTHEGDTVEKSLSPAECL

SEQ ID NO: 1469 - protein, 104 aa, synthetic construct
QPKSTPTLTMFPPSPEELQENKATLVCLISNFSPSGVTVAWKANGTPITQGVDTSNPTKEDNKYMASSFLHLTSDQWRSHNSFTCQVTHEGDTVEKSLSPAECL

SEQ ID NO: 1470 - protein, 329 aa, synthetic construct
ASTKGPSVFPLAPSSKSTSGGTAALGCLVKDYFPEPVTVSWNSGALTSGVHTFPAVLQSSGLYSLSSVVTVPSSSLGTQTYICNVNHKPSNTKVDKRVEPKSCDKTHTCPPCPAPELLGGPSVFLFPPKPKDTLMISRTPEVTCVVVDVSHEDPEVKFNWYVDGVEVHNAKTKPREEQYNSTYRVVSVLTVLHQDWLNGKEYKCKVSNKALPAPIEKTISKAKGQPREPQVYTLPPSREEMTKNQVSLTCLVKGFYPSDIAVEWESNGQPENNYKTTPPVLDSDGSFFLYSKLTVDKSRWQQGNVFSCSVMHEALHNHYTQKSLSLSPG

SEQ ID NO: 1471 - DNA, 987 bp, synthetic construct
  source 1..987: mol_type = other DNA
gccagcacaaaagggcccagtgtgttcccgctcgcaccaagcagcaaatcaacgtcaggcggcacagccgcgttgggttgccttgtaaaagactacttcccagaaccagttacggtgtcatggaacagtggtgcactcacgagcggcgttcataccttccccgccgtacttcagagttcaggtctttactcactttccagcgtggtcacagtaccgtcaagctctcttggaacacagacatatatctgtaacgtaaatcataagcctagcaataccaaagtcgataaacgagtggaacccaagagttgtgataaaacccacacctgtcccccttgcccggcaccggaactgctgggtggtccatcagtattcttgtttccgcctaagccaaaggacacactgatgatatccagaactccagaggttacgtgcgtagtcgtggacgtcagtcatgaagaccccgaagttaagttcaactggtacgtggatggtgtggaagtacataatgcgaagacgaaacccagggaagaacaatataactcaacttatagggtagtcagcgtcttgactgtacttcaccaagattggttgaatggcaaagagtacaaatgcaaggtaagcaacaaagcattgcctgcgccaatcgaaaagactatctcaaaagcaaagggccagccacgcgaaccacaagtgtatacattgccgcccagtcgggaagaaatgacgaaaaatcaagtcagtctcacatgcctcgtgaaaggattttatccctctgacatagctgtggagtgggaaagtaatggccaacccgaaaataattacaaaacgacgcctcccgttttggactcagatgggagttttttcctttacagtaagctgacggttgacaaaagcaggtggcaacaagggaacgtcttttcttgtagtgtgatgcatgaggcgctccacaatcattacactcaaaaatccttgagcctgtctccaggc

SEQ ID NO: 1472 - protein, 326 aa, synthetic construct
ASTKGPSVFPLAPCSRSTSESTAALGCLVKDYFPEPVTVSWNSGALTSGVHTFPAVLQSSGLYSLSSVVTVPSSNFGTQTYTCNVDHKPSNTKVDKTVERKCCVECPPCPAPPVAGPSVFLFPPKPKDTLMISRTPEVTCVVVDVSHEDPEVQFNWYVDGVEVHNAKTKPREEQFNSTFRVVSVLTVVHQDWLNGKEYKCKVSNKGLPAPIEKTISKTKGQPREPQVYTLPPSREEMTKNQVSLTCLVKGFYPSDISVEWESNGQPENNYKTTPPMLDSDGSFFLYSKLTVDKSRWQQGNVFSCSVMHEALHNHYTQKSLSLSPGK

SEQ ID NO: 1473 - protein, 377 aa, synthetic construct
ASTKGPSVFPLAPCSRSTSGGTAALGCLVKDYFPEPVTVSWNSGALTSGVHTFPAVLQSSGLYSLSSVVTVPSSSLGTQTYTCNVNHKPSNTKVDKRVELKTPLGDTTHTCPRCPEPKSCDTPPPCPRCPEPKSCDTPPPCPRCPEPKSCDTPPPCPRCPAPELLGGPSVFLFPPKPKDTLMISRTPEVTCVVVDVSHEDPEVQFKWYVDGVEVHNAKTKPREEQYNSTFRVVSVLTVLHQDWLNGKEYKCKVSNKALPAPIEKTISKTKGQPREPQVYTLPPSREEMTKNQVSLTCLVKGFYPSDIAVEWESSGQPENNYNTTPPMLDSDGSFFLYSKLTVDKSRWQQGNIFSCSVMHEALHNRFTQKSLSLSPGK

SEQ ID NO: 1474 - protein, 327 aa, synthetic construct
ASTKGPSVFPLAPCSRSTSESTAALGCLVKDYFPEPVTVSWNSGALTSGVHTFPAVLQSSGLYSLSSVVTVPSSSLGTKTYTCNVDHKPSNTKVDKRVESKYGPPCPSCPAPEFLGGPSVFLFPPKPKDTLMISRTPEVTCVVVDVSQEDPEVQFNWYVDGVEVHNAKTKPREEQFNSTYRVVSVLTVLHQDWLNGKEYKCKVSNKGLPSSIEKTISKAKGQPREPQVYTLPPSQEEMTKNQVSLTCLVKGFYPSDIAVEWESNGQPENNYKTTPPVLDSDGSFFLYSRLTVDKSRWQEGNVFSCSVMHEALHNHYTQKSLSLSLGK

SEQ ID NO: 1475 - protein, 106 aa, synthetic construct
GQPKANPTVTLFPPSSEELQANKATLVCLISDFYPGAVTVAWKADGSPVKAGVETTKPSKQSNNKYAASSYLSLTPEQWKSHRSYSCQVTHEGSTVEKTVAPTECS

SEQ ID NO: 1476 - protein, 106 aa, synthetic construct
GQPKAAPSVTLFPPSSEELQANKATLVCLISDFYPGAVTVAWKADSSPVKAGVETTTPSKQSNNKYAASSYLSLTPEQWKSHRSYSCQVTHEGSTVEKTVAPTECS

SEQ ID NO: 1477 - protein, 106 aa, synthetic construct
GQPKAAPSVTLFPPSSEELQANKATLVCLISDFYPGAVTVAWKADSSPVKAGVETTTPSKQSNNKYAASSYLSLTPEQWKSHKSYSCQVTHEGSTVEKTVAPTECS

SEQ ID NO: 1478 - protein, 106 aa, synthetic construct
GQPKAAPSVTLFPPSSEELQANKATLVCLISDFYPGAVKVAWKADGSPVNTGVETTTPSKQSNNKYAASSYLSLTPEQWKSHRSYSCQVTHEGSTVEKTVAPAECS

SEQ ID NO: 1479 - protein, 106 aa, synthetic construct
GQPKAAPSVTLFPPSSEELQANKATLVCLVSDFNPGAVTVAWKADGSPVKVGVETTKPSKQSNNKYAASSYLSLTPEQWKSHRSYSCRVTHEGSTVEKTVAPAECS

SEQ ID NO: 1480 - protein, 106 aa, synthetic construct
TVAAPSVFIFPPSDEQLKSGTASVVCLLNNFYPREAKVQWKVDNALQSGNSQESVTEQDSKDSTYSLSSTLTLSKADYEKHKVYACEVTHQGLSSPVTKSFNRGEC

SEQ ID NO: 1481 - DNA, 318 bp, synthetic construct
  source 1..318: mol_type = other DNA
actgtcgcagcaccttctgtcttcatctttccgccaagcgatgaacagttgaaatctggaacagcgtccgtggtgtgcctgctcaacaacttctatcctcgggaagcgaaggtgcaatggaaggtagataatgctcttcagagtggcaattcccaagagtcagttacggagcaagatagcaaggacagcacgtattccctgtctagtacgttgactctttccaaggctgactatgaaaagcacaaggtgtatgcctgtgaagtaacccaccaaggtctctcaagtcctgtaactaagagctttaatcgaggagaatgc

SEQ ID NO: 1482 - DNA, 969 bp, synthetic construct; identical to SEQ ID NO: 1132
  source 1..969: mol_type = other DNA

SEQ ID NO: 1483 - protein, 323 aa, synthetic construct; identical to SEQ ID NO: 1142

SEQ ID NO: 1484 - DNA, 321 bp, synthetic construct; identical to SEQ ID NO: 196
  source 1..321: mol_type = other DNA

SEQ ID NO: 1485 - protein, 107 aa, synthetic construct; identical to SEQ ID NO: 1145

SEQ ID NO: 1486 - protein, 327 aa, synthetic construct
ASTKGPSVFPLAPCSRSTSESTAALGCLVKDYFPEPVTVSWNSGALTSGVHTFPAVLQSSGLYSLSSVVTVPSSSLGTKTYTCNVDHKPSNTKVDKRVESKYGPPCPPCPAPEFLGGPSVFLFPPKPKDTLMISRTPEVTCVVVDVSQEDPEVQFNWYVDGVEVHNAKTKPREEQFNSTYRVVSVLTVLHQDWLNGKEYKCKVSNKGLPSSIEKTISKAKGQPREPQVYTLPPSQEEMTKNQVSLTCLVKGFYPSDIAVEWESNGQPENNYKTTPPVLDSDGSFFLYSRLTVDKSRWQEGNVFSCSVMHEALHNHYTQKSLSLSLGK

SEQ ID NO: 1487 - DNA, 981 bp, synthetic construct
  source 1..981: mol_type = other DNA
gctagcaccaagggtccttccgtgtttcctctagccccttgcagcagaagcacaagcgagagcaccgccgccctgggctgcctggttaaagattatttccctgagcctgtgaccgtgagctggaatagcggcgccctgacaagcggcgtgcacaccttccctgccgtgctgcagagcagcggcctgtacagcctgagcagcgtggtgaccgtgccttctagcagcctgggtactaagacctacacctgcaacgtggaccacaagcctagcaacaccaaggtggacaagagagtggagagcaagtacggtcctccgtgtcccccgtgccctgcccctgagttcctgggcggccctagcgttttcttgtttccacctaagcctaaggacaccctgatgatcagcagaacccctgaggtgacctgcgtggtggtggacgtgagccaagaggaccctgaggtgcagttcaactggtacgtggacggcgtggaggtgcacaacgccaagaccaagcctagagaggagcagttcaacagcacctacagagtggtgagcgtgctgaccgtgctgcaccaagactggctgaacggcaaggagtacaagtgcaaggtgagcaacaagggcctgcctagcagtattgaaaagaccatcagcaaggccaagggacagcctagagagcctcaagtgtacaccctgcctcctagccaagaggagatgaccaagaaccaagtgagcctgacctgcctggtgaaggggttttaccctagcgacatcgccgtggagtgggagagcaacggacagcctgagaacaactacaagaccacccctcctgtgctggacagcgacggcagcttcttcctgtacagcagactgaccgtggacaagagcagatggcaagagggcaacgtgttcagctgcagcgtgatgcacgaggccctgcacaaccactacacacagaagagcctgagcctgagcctgggcaag

SEQ ID NO: 1488 - DNA, 981 bp, synthetic construct
  source 1..981: mol_type = other DNA
gctagcacgaaaggtccaagcgttttccctctagccccttgcagcagaagcacaagcgagagcaccgccgccctgggctgccttgtaaaagattacttccctgagcctgtgaccgtgagttggaacagcggcgccctgacaagcggcgtgcacaccttccctgccgtgctgcagagcagcggcctgtacagcctgagcagcgtggtgaccgtgccaagcagcagcctgggcaccaagacctacacctgcaacgtggaccacaagcctagcaacaccaaggtggacaagagagtggagagcaagtacggtcctccgtgtcccccgtgccctgcccctgagttcctgggcggcccttcggtgtttctgtttccacctaagcctaaggacaccctgatgatcagcagaacccctgaggtgacctgcgtggtggtggacgtgagccaagaggaccctgaggtgcagttcaactggtacgtggacggcgtggaggtgcacaacgccaagaccaagcctagagaggagcagttcaacagcacctacagagtggtgagcgtgctgaccgtgctgcaccaagactggctgaacggcaaggagtacaagtgcaaggtgagcaacaagggcctgcctagttccattgagaagaccatcagcaaggccaagggacagcctagagagcctcaagtgtacaccctgcctcctagccaagaggagatgaccaagaaccaagtgagcctgacctgcctggtgaagggattctaccctagcgacatcgccgtggagtgggagagcaacggacagcctgagaacaactacaagaccacccctcctgtgctggacagcgacggcagcttcttcctgtacagcagactgaccgtggacaagagcagatggcaagagggcaacgtgttcagctgcagcgtgatgcacgaggccctgcacaaccactacacacagaagagcctgagcctgagcctgggcaag

SEQ ID NO: 1489 - DNA, 981 bp, synthetic construct
  source 1..981: mol_type = other DNA
gctagcaccaagggtcctagtgtatttcccctagccccttgcagcagaagcacaagcgagagcaccgccgccctgggctgcttggtgaaggactacttccctgagcctgtcacagtgtcctggaatagcggcgccctgacaagcggcgtgcacaccttccctgccgtgctgcagagcagcggcctgtacagcctgagcagcgtggtgaccgtgccttcgtcgagcctgggcaccaagacctacacctgcaacgtggaccacaagcctagcaacaccaaggtggacaagagagtggagagcaagtacggtcctccgtgtcccccgtgccctgcccctgagttcctgggcggccctagcgtgttcctatttccacctaagcctaaggacaccctgatgatcagcagaacccctgaggtgacctgcgtggtggtggacgtgagccaagaggaccctgaggtgcagttcaactggtacgtggacggcgtggaggtgcacaacgccaagaccaagcctagagaggagcagttcaacagcacctacagagtggtgagcgtgctgaccgtgctgcaccaagactggctgaacggcaaggagtacaagtgcaaggtgagcaacaagggcctgcctagcagtatcgagaagaccatcagcaaggccaagggacagcctagagagcctcaagtgtacaccctgcctcctagccaagaggagatgaccaagaaccaagtgagcctgacctgcctggtaaaaggtttctaccctagcgacatcgccgtggagtgggagagcaacggacagcctgagaacaactacaagaccacccctcctgtgctggacagcgacggcagcttcttcctgtacagcagactgaccgtggacaagagcagatggcaagagggcaacgtgttcagctgcagcgtgatgcacgaggccctgcacaaccactacacacagaagagcctgagcctgagcctgggcaag

SEQ ID NO: 1490 - DNA, 981 bp, synthetic construct
  source 1..981: mol_type = other DNA
gctagcaccaagggtcctagtgtatttcccctagccccttgcagcagaagcacaagcgagagcaccgccgccctgggctgcttggtgaaggactacttccctgagcctgtgaccgtgagctggaacagcggcgccctgacaagcggcgtgcacaccttccctgccgtgctgcagagcagcggcctgtacagcctgagcagcgtggtgaccgtgccttcgtcgagcctgggcaccaagacctacacctgcaacgtggaccacaagcctagcaacaccaaggtggacaagagagtggagagcaagtacggtcctccgtgtcccccgtgccctgcccctgagttcctgggcggccctagcgtgttcctatttccacctaagcctaaggacaccctgatgatcagcagaacccctgaggtgacctgcgtggtggtggacgtgagccaagaggaccctgaggtgcagttcaactggtacgtggacggcgtggaggtgcacaacgccaagaccaagcctagagaggagcagttcaacagcacctacagagtggtgagcgtgctgaccgtgctgcaccaagactggctgaacggcaaggagtacaagtgcaaggtgagcaacaagggcctgcctagcagtatcgagaagaccatcagcaaggccaagggacagcctagagagcctcaagtgtacaccctgcctcctagccaagaggagatgaccaagaaccaagtgagcctgacctgcctggtaaaaggtttctaccctagcgacatcgccgtggagtgggagagcaacggacagcctgagaacaactacaagaccacccctcctgtgctggacagcgacggcagcttcttcctgtactcccgcctgacggttgacaagagcagatggcaagagggcaacgtgttcagctgcagcgtgatgcacgaggccctgcacaaccactacacacagaagagcctgagcctgagcctgggcaag

SEQ ID NO: 1491 - protein, 107 aa, synthetic construct [sequence omitted]

SEQ ID NO: 1492 - DNA, 321 bp, synthetic construct
  source 1..321: mol_type = other DNA
agaaccgtggccgcccctagcgtgttcatcttccctcctagcgacgagcagctgaagagcggcaccgctagcgtggtgtgcctgctgaacaacttctaccctagagaggccaaggtgcagtggaaggtggacaacgccctgcagagcggcaacagccaagagagcgtgaccgagcaagacagcaaggacagcacctacagcctgagcagcaccctgaccctgagcaaggccgactacgagaagcacaaggtgtacgcctgcgaggtgacccaccaaggcctgagcagccctgtgaccaagagcttcaacagaggcgagtgc

SEQ ID NO: 1493 - DNA, 321 bp, synthetic construct
  source 1..321: mol_type = other DNA
agaaccgtggccgcccctagcgtgttcatcttccctcctagcgacgagcagctgaagagcggcaccgctagcgtggtgtgcctgctgaacaacttctaccctagagaggccaaggtgcagtggaaggtggacaacgccctgcagagcggcaacagccaagagagcgtgaccgagcaagacagcaaggacagcacctacagcctgagcagcaccctgaccctgagcaaggccgactacgagaagcacaaggtgtacgcctgcgaggtgacccaccaaggcctgtcaagccctgtaactaagagcttcaacagaggcgagtgc

SEQ ID NO: 1494 - DNA, 23 bp, synthetic construct
  source 1..23: mol_type = other DNA
acaaacaccattgtcacactcca

SEQ ID NO: 1495 - DNA, 71 bp, synthetic construct
  source 1..71: mol_type = other DNA
acaaacaccattgtcacactccacacaaacaccattgtcacactccacacaaacaccattgtcacactcca

SEQ ID NO: 1496 - DNA, 23 bp, synthetic construct
  source 1..23: mol_type = other DNA
tccataaagtaggaaacactaca

SEQ ID NO: 1497 - DNA, 22 bp, synthetic construct
  source 1..22: mol_type = other DNA
agtgaattctaccagtgccata

SEQ ID NO: 1498 - DNA, 24 bp, synthetic construct
  source 1..24: mol_type = other DNA
agtgtgagttctaccattgccaaa

SEQ ID NO: 1499 - DNA, 23 bp, synthetic construct
  source 1..23: mol_type = other DNA
agcaaaaatgtgctagtgccaaa

SEQ ID NO: 1500 - protein, 7 aa, synthetic construct
DYTFTNY

SEQ ID NO: 1501 - protein, 6 aa, synthetic construct
DPNSGG

SEQ ID NO: 1502 - protein, 4 aa, synthetic construct
DFDV

SEQ ID NO: 1503 - protein, 5 aa, synthetic construct
NYWMH

SEQ ID NO: 1504 - protein, 17 aa, synthetic construct
RIDPNSGGTRYNEKFKN

SEQ ID NO: 1505 - protein, 8 aa, synthetic construct
DYTFTNYW

SEQ ID NO: 1506 - protein, 8 aa, synthetic construct
IDPNSGGT

SEQ ID NO: 1507 - protein, 6 aa, synthetic construct
AGDFDV

SEQ ID NO: 1508 - protein, 25 aa, synthetic construct
QVQLQQPGAELVKPGASVKLSCKAS

SEQ ID NO: 1509 - protein, 19 aa, synthetic construct
WMHWVKQRPGRGLEWIGRI

SEQ ID NO: 1510 - protein, 41 aa, synthetic construct
TRYNEKFKNKATLTVDKPSSTAYMHLSSLTSEDSAVYYCAG

SEQ ID NO: 1511 - protein, 11 aa, synthetic construct
WGTGTTVTVSS

SEQ ID NO: 1512 - protein, 113 aa, synthetic construct
QVQLQQPGAELVKPGASVKLSCKASDYTFTNYWMHWVKQRPGRGLEWIGRIDPNSGGTRYNEKFKNKATLTVDKPSSTAYMHLSSLTSEDSAVYYCAGDFDVWGTGTTVTVSS

SEQ ID NO: 1513 - DNA, 339 bp, synthetic construct
  source 1..339: mol_type = other DNA
caggtccaactgcagcagcctggggctgagcttgtgaagcctggggcttcagtgaagctgtcctgcaaggcttctgactacaccttcaccaactactggatgcactgggtgaagcagaggcctggacgaggccttgagtggataggaaggattgatcctaatagtggtggtactaggtacaatgagaagttcaagaacaaggccacactgactgttgacaaaccctccagcacagcctacatgcatctcagcagcctgacatctgaggactctgcggtctattattgtgcaggggacttcgatgtctggggcacagggaccacggtcaccgtctcctca

SEQ ID NO: 1514 - protein, 11 aa, synthetic construct
RASGNIHNYLA

SEQ ID NO: 1515 - protein, 7 aa, synthetic construct
NAKTLPD

SEQ ID NO: 1516 - protein, 9 aa, synthetic construct
QHFWSTPLT

SEQ ID NO: 1517 - protein, 6 aa, synthetic construct
GNIHNY

SEQ ID NO: 1518 - skipped

SEQ ID NO: 1519 - protein, 23 aa, synthetic construct
DIQMTQSPASLSASVGETVTITC

SEQ ID NO: 1520 - protein, 15 aa, synthetic construct
WYQQRQGKSPQLLVY

SEQ ID NO: 1521 - protein, 32 aa, synthetic construct
GVPSRFSGSGSGTQYSLKINSLQPEDFGSYCC

SEQ ID NO: 1522 - protein, 10 aa, synthetic construct
FGAGTKLELK

SEQ ID NO: 1523 - protein, 107 aa, synthetic construct
DIQMTQSPASLSASVGETVTITCRASGNIHNYLAWYQQRQGKSPQLLVYNAKTLPDGVPSRFSGSGSGTQYSLKINSLQPEDFGSYCCQHFWSTPLTFGAGTKLELK

SEQ ID NO: 1524 - DNA, 321 bp, synthetic construct
  source 1..321: mol_type = other DNA
gacatccagatgactcagtctccagcctccctatctgcatctgtgggagaaactgtcaccatcacatgtcgagcaagtgggaatattcacaattatttagcatggtatcagcagagacagggaaaatctcctcagctcctggtctataatgcaaaaaccttaccagatggtgtgccatcaaggttcagtggcagtggatcaggaacacaatattctctcaagatcaacagcctgcagcctgaagattttgggagttattgctgtcaacatttttggagtactccgctcacgttcggtgctgggaccaagttggagctgaaa

SEQ ID NO: 1525 - protein, 7 aa, synthetic construct
GFTFTDY

SEQ ID NO: 1526 - protein, 8 aa, synthetic construct
RNKAKGFT

SEQ ID NO: 1527 - protein, 4 aa, synthetic construct
DINY

SEQ ID NO: 1528 - protein, 5 aa, synthetic construct
DYYMS

SEQ ID NO: 1529 - protein, 19 aa, synthetic construct
LIRNKAKGFTTEYSASVKG

SEQ ID NO: 1530 - protein, 8 aa, synthetic construct
GFTFTDYY

SEQ ID NO: 1531 - protein, 10 aa, synthetic construct
IRNKAKGFTT

SEQ ID NO: 1532 - protein, 6 aa, synthetic construct
VRDINY

SEQ ID NO: 1533 - protein, 25 aa, synthetic construct
EVQLVESGGALVQPGGSLSLSCAAS

SEQ ID NO: 1534 - protein, 19 aa, synthetic construct
YMSWVRQPPGKALEWLALI

SEQ ID NO: 1535 - protein, 41 aa, synthetic construct
TEYSASVKGRFTISRDNSQSILLFQMNDLRADDSATYYCVR

SEQ ID NO: 1536 - protein, 11 aa, synthetic construct
WGQGTTLTVSS

SEQ ID NO: 1537 - protein, 115 aa, synthetic construct
EVQLVESGGALVQPGGSLSLSCAASGFTFTDYYMSWVRQPPGKALEWLALIRNKAKGFTTEYSASVKGRFTISRDNSQSILLFQMNDLRADDSATYYCVRDINYWGQGTTLTVSS

SEQ ID NO: 1538 - DNA, 345 bp, synthetic construct
  source 1..345: mol_type = other DNA
gaggtgcagctggtggagtctggaggagccttggtacagcctgggggttctctgagtctctcctgtgcagcttctggattcaccttcactgattactacatgagctgggtccgccagcctccagggaaggcacttgagtggctggctttgattagaaacaaagctaaaggtttcacaacagaatacagtgcatctgtgaagggtcggttcaccatctccagagataattcccaaagcatcctcctttttcaaatgaatgacctgagagctgacgacagtgccacttattactgtgtaagagatataaactactggggccaaggcaccactctcacagtctcctca

SEQ ID NO: 1539 - protein, 17 aa, synthetic construct
KSSQSLLYSTNQENYLA

SEQ ID NO: 1540 - protein, 7 aa, synthetic construct
WASSRES

SEQ ID NO: 1541 - protein, 9 aa, synthetic construct
QQYYSYPRT

SEQ ID NO: 1542 - protein, 12 aa, synthetic construct
QSLLYSTNQENY

SEQ ID NO: 1543 - DNA, 12 bp, synthetic construct
  source 1..12: mol_type = other DNA
agaaagaggcga

SEQ ID NO: 1544 - protein, 23 aa, synthetic construct
DIVMSQSPSSLAVSVGEKVTMSC

SEQ ID NO: 1545 - protein, 15 aa, synthetic construct
WYQQKPGQSPKLLIY

SEQ ID NO: 1546 - protein, 32 aa, synthetic construct
GVPDRFTGSGSGTDFTLTISSVKAEDLAVYYC

SEQ ID NO: 1547 - protein, 10 aa, synthetic construct
FGGGTKLEIK

SEQ ID NO: 1548 - protein, 113 aa, synthetic construct
DIVMSQSPSSLAVSVGEKVTMSCKSSQSLLYSTNQENYLAWYQQKPGQSPKLLIYWASSRESGVPDRFTGSGSGTDFTLTISSVKAEDLAVYYCQQYYSYPRTFGGGTKLEIK

SEQ ID NO: 1549 - DNA, 339 bp, synthetic construct
  source 1..339: mol_type = other DNA
gacattgtgatgtcacagtctccatcctccctagctgtgtcagttggagagaaggttactatgagctgcaagtccagtcagagccttttatatagtaccaatcaagagaactacttggcctggtaccagcagaaaccagggcagtctcctaaactgctgatttactgggcatcctctagggaatctggggtccctgatcgctttacaggcagtggatctgggacagatttcactctcaccatcagcagtgtgaaggctgaagacctggcagtttattactgtcagcaatattatagctatcctcggacgttcggtggaggcaccaagctggaaatcaaa

SEQ ID NO: 1550 - protein, 7 aa, synthetic construct
GFTFTRY

SEQ ID NO: 1551 - protein, 6 aa, synthetic construct
NPNNGG

SEQ ID NO: 1552 - protein, 9 aa, synthetic construct
GTGTGAMDY

SEQ ID NO: 1553 - protein, 5 aa, synthetic construct
RYWMH

SEQ ID NO: 1554 - protein, 17 aa, synthetic construct
NINPNNGGTDFNEKFKN

SEQ ID NO: 1555 - protein, 8 aa, synthetic construct
GFTFTRYW

SEQ ID NO: 1556 - protein, 8 aa, synthetic construct
INPNNGGT

SEQ ID NO: 1557 - protein, 11 aa, synthetic construct
ARGTGTGAMDY

SEQ ID NO: 1558 - protein, 25 aa, synthetic construct
QVQLQQPGTELVKPGSSVNLSCKAS

SEQ ID NO: 1559 - protein, 19 aa, synthetic construct
WMHWVKERPGHGLEWIGNI

SEQ ID NO: 1560 - protein, 41 aa, synthetic construct
TDFNEKFKNKATLTVHKSSTTVFIQLSSLTSEDSAVYYCAR

SEQ ID NO: 1561 - protein, 11 aa, synthetic construct
WGQGTSVTVSS

SEQ ID NO: 1562 - protein, 118 aa, synthetic construct; identical to SEQ ID NO: 1141

SEQ ID NO: 1563 - DNA, 354 bp, synthetic construct
  source 1..354: mol_type = other DNA
caggtccaactgcagcagcctgggactgaactggtgaagcctgggtcttcagtgaacctgtcctgcaaggcttctggcttcaccttcaccaggtactggatgcactgggtgaaggagaggcctggacatggccttgagtggattggaaatattaatcctaacaatggtggtactgacttcaatgagaagttcaagaacaaggccacactgactgtacacaagtcctccaccacagtcttcatccaactcagcagcctgacatctgaggactctgcggtctattattgtgcaagaggaactgggacgggagctatggactactggggtcaaggaacctcagtcaccgtctcctca

SEQ ID NO: 1564 - protein, 16 aa, synthetic construct
RSSQSLVHNNGITYLY

SEQ ID NO: 1565 - protein, 7 aa, synthetic construct
RVSNRFS

SEQ ID NO: 1566 - protein, 9 aa, synthetic construct
FQGTHVPRT

SEQ ID NO: 1567 - protein, 16 aa, synthetic construct
RSSQSLVHNNGITYLY

SEQ ID NO: 1568 - protein, 11 aa, synthetic construct
QSLVHNNGITY

SEQ ID NO: 1569 - DNA, 12 bp, synthetic construct
  source 1..12: mol_type = other DNA
cgggccaagcgg

SEQ ID NO: 1570 - protein, 23 aa, synthetic construct
DVVMTQTPLSLPVSLGDQASISC

SEQ ID NO: 1571 - protein, 15 aa, synthetic construct
WYLQKPGQSPKLLIY

SEQ ID NO: 1572 - protein, 32 aa, synthetic construct
GVPDRFGGSGSGTDFTLKISRVEAEDLGVYFC

SEQ ID NO: 1573 - protein, 112 aa, synthetic construct; identical to SEQ ID NO: 1144

SEQ ID NO: 1574 - DNA, 336 bp, synthetic construct
  source 1..336: mol_type = other DNA
gatgttgtgatgacccaaactccactctccctgcctgtcagtcttggagatcaagcttccatctcttgcagatctagtcagagccttgtacacaacaatggaatcacctatttatattggtacctgcagaagccaggccagtctccaaagctcctgatctacagggtttccaaccgattttctggggtcccagacaggttcggtggcagtggatcagggacagatttcacactcaagatcagcagagtggaggctgaggatctgggagtttatttctgctttcaaggtacacatgttcctcggacgttcggtggaggcaccaagctggaaatcaaa

SEQ ID NO: 1575 - protein, 7 aa, synthetic construct
GYTFTIF

SEQ ID NO: 1576 - protein, 5 aa, synthetic construct
IFWMH

SEQ ID NO: 1577 - protein, 17 aa, synthetic construct
KINPNNGGGDYNEKFKS

SEQ ID NO: 1578 - protein, 8 aa, synthetic construct
GYTFTIFW

SEQ ID NO: 1579 - protein, 8 aa, synthetic construct
INPNNGGG

SEQ ID NO: 1580 - protein, 25 aa, synthetic construct
QVQLQQPGTELVKPGASVKLSCKAS

SEQ ID NO: 1581 - protein, 19 aa, synthetic construct
WMHWVKQRPGHGLEWIGKI

SEQ ID NO: 1582 - protein, 41 aa, synthetic construct
GDYNEKFKSKATLTVDKSSTTAYLQLSSLTSEDSAVYYCAR

SEQ ID NO: 1583 - protein, 118 aa, synthetic construct
QVQLQQPGTELVKPGASVKLSCKASGYTFTIFWMHWVKQRPGHGLEWIGKINPNNGGGDYNEKFKSKATLTVDKSSTTAYLQLSSLTSEDSAVYYCARGTGTGAMDYWGQGTSVTVSS

SEQ ID NO: 1584 - DNA, 354 bp, synthetic construct
  source 1..354: mol_type = other DNA
caggtccaactgcagcagcctgggactgaactggtgaagcctggggcttcagtgaagctgtcctgcaaggcttctggctacaccttcaccatcttctggatgcactgggtgaagcagaggcctggacatggccttgagtggattggaaagattaatcctaacaatggaggtggtgactacaatgagaaattcaagagtaaggccacattgactgtagacaaatcctccaccacagcctacttgcagctcagcagcctgacatctgaggactctgcggtctattattgtgcaagaggaactgggacgggagctatggactactggggtcaaggaacctcagtcaccgtctcctca

SEQ ID NO: 1585 - protein, 16 aa, synthetic construct
RSSQSLVHSNGITHLY

SEQ ID NO: 1586 - protein, 11 aa, synthetic construct
QSLVHSNGITH

SEQ ID NO: 1587 - protein, 23 aa, synthetic construct
DVVMTQTPLSLPVSLGDHASISC

SEQ ID NO: 1588 - protein, 15 aa, synthetic construct
WYLQRPGQTPKLLIY

SEQ ID NO: 1589 - protein, 32 aa, synthetic construct
GVPDRFSGSGSGTDFTLKISSVEAEDLGVYFC

SEQ ID NO: 1590 - protein, 10 aa, synthetic construct
FGGGTKLEIE

SEQ ID NO: 1591 - protein, 112 aa, synthetic construct
DVVMTQTPLSLPVSLGDHASISCRSSQSLVHSNGITHLYWYLQRPGQTPKLLIYRVSNRFSGVPDRFSGSGSGTDFTLKISSVEAEDLGVYFCFQGTHVPRTFGGGTKLEIE

SEQ ID NO: 1592 - DNA, 336 bp, synthetic construct
  source 1..336: mol_type = other DNA
gatgttgtgatgacccaaactccactctccctgcctgtcagtcttggagatcacgcttccatctcttgcagatctagtcagagccttgtacacagcaatggaatcacccatttatattggtacctgcagaggccaggccagactccaaagctcctgatctacagggtttccaaccgattttctggggtcccagacaggttcagtggcagtggatcagggacagatttcacactcaagatcagcagcgtggaggctgaggatctgggagtttatttctgctttcaaggtacacatgttcctcggacgttcggtggaggcaccaagctggaaatcgaa

SEQ ID NO: 1593 - protein, 7 aa, synthetic construct
GYTFTRF

SEQ ID NO: 1594 - protein, 5 aa, synthetic construct
RFWMH

SEQ ID NO: 1595 - protein, 17 aa, synthetic construct
NINPNNGGTDNNERFKS

SEQ ID NO: 1596 - protein, 8 aa, synthetic construct
GYTFTRFW

SEQ ID NO: 1597 - protein, 19 aa, synthetic construct
WMHWVKQRPGQGLEWIGNI

SEQ ID NO: 1598 - protein, 41 aa, synthetic construct
TDNNERFKSKATLTVDRSSSTAYMQLSSLTSEDSAVYYCAR

SEQ ID NO: 1599 - protein, 118 aa, synthetic construct
QVQLQQPGTELVKPGASVKLSCKASGYTFTRFWMHWVKQRPGQGLEWIGNINPNNGGTDNNERFKSKATLTVDRSSSTAYMQLSSLTSEDSAVYYCARGTGTGAMDYWGQGTSVTVSS

SEQ ID NO: 1600 - DNA, 354 bp, synthetic construct
  source 1..354: mol_type = other DNA
caggtccaactgcagcagcctgggactgaactggtgaagcctggggcttcagtgaagctgtcctgcaaggcttctggctacaccttcaccaggttctggatgcactgggtgaagcagaggcctggacaaggccttgagtggattggaaatattaatcctaacaatggtggtactgacaataatgagaggttcaagagcaaggccacactgactgtagacagatcctccagcacagcctacatgcagctcagcagcctgacatctgaggactctgcggtctattattgtgcaagaggaactgggacgggagctatggactactggggtcaaggaacctcagtcaccgtctcctca

SEQ ID NO: 1601 - protein, 16 aa, synthetic construct
RSSQSLVHSNGNTHLY

SEQ ID NO: 1602 - protein, 7 aa, synthetic construct
RVSSRFS

SEQ ID NO: 1603 - protein, 11 aa, synthetic construct
QSLVHSNGNTH

SEQ ID NO: 1604 - protein, 23 aa, synthetic construct
DVVMTQTPLSLPVSLGDQASISC

SEQ ID NO: 1605 - protein, 32 aa, synthetic construct
GVPDRFSGSGSGTDFTLKISRVEAEDLGVYFC

SEQ ID NO: 1606 - protein, 112 aa, synthetic construct
DVVMTQTPLSLPVSLGDQASISCRSSQSLVHSNGNTHLYWYLQKPGQSPKLLIYRVSSRFSGVPDRFSGSGSGTDFTLKISRVEAEDLGVYFCFQGTHVPRTFGGGTKLEIK

SEQ ID NO: 1607 - DNA, 336 bp, synthetic construct
  source 1..336: mol_type = other DNA
gatgtggtgatgacccaaactccactctccctgcctgtcagtcttggagatcaggcttccatctcttgcagatctagtcagagccttgtacacagcaatggaaacacccatttatattggtacctgcagaagccaggccagtctccaaagctcctgatctacagggtttccagccgattttctggggtcccagacaggttcagtggcagtggatcagggacagatttcacactcaagatcagcagagtggaggctgaggatctgggagtttatttctgctttcagggtacacatgttcctcggacgttcggtggaggcaccaagctggaaatcaaa

SEQ ID NO: 1608 - protein, 9 aa, synthetic construct
GFSLSTSAM

SEQ ID NO: 1609 - protein, 5 aa, synthetic construct
YWDDD

SEQ ID NO: 1610 - protein, 9 aa, synthetic construct
RRRGYGMDY

SEQ ID NO: 1611 - protein, 7 aa, synthetic construct
TSAMGVS

SEQ ID NO: 1612 - protein, 16 aa, synthetic construct
HIYWDDDKRYNPSLKS

SEQ ID NO: 1613 - protein, 10 aa, synthetic construct
GFSLSTSAMG

SEQ ID NO: 1614 - protein, 7 aa, synthetic construct
IYWDDDK

SEQ ID NO: 1615 - protein, 11 aa, synthetic construct
ARRRRGYGMDY

SEQ ID NO: 1616 - protein, 25 aa, synthetic construct
QITLKESGPGILQSSQTLSLTCSFS

SEQ ID NO: 1617 - protein, 19 aa, synthetic construct
GVSWIRQPSGEGLEWLAHI

SEQ ID NO: 1618 - protein, 41 aa, synthetic construct
KRYNPSLKSRLTISKDTSRNQVFLKITSVDTADTATYYCAR

SEQ ID NO: 1619 - protein, 119 aa, synthetic construct
QITLKESGPGILQSSQTLSLTCSFSGFSLSTSAMGVSWIRQPSGEGLEWLAHIYWDDDKRYNPSLKSRLTISKDTSRNQVFLKITSVDTADTATYYCARRRRGYGMDYWGQGTSVTVSS

SEQ ID NO: 1620 - DNA, 357 bp, synthetic construct
  source 1..357: mol_type = other DNA
cagattactctgaaagagtctggccctgggatattgcagtcctcccagaccctcagtctgacttgttctttctctgggttttcactgagcacttctgctatgggtgtgagttggattcgtcagccttcaggagagggtctggagtggctggcacacatttactgggatgatgacaagcgctataacccatccctgaagagccggctcacaatctccaaggatacctccagaaaccaggtattcctcaagatcaccagtgtggacactgcagatactgccacatactactgtgctcgaagaaggagggggtatggtatggactactggggtcaaggaacctcagtcaccgtctcctca

SEQ ID NO: 1621 - protein, 11 aa, synthetic construct
KASQSVSNDVA

SEQ ID NO: 1622 - protein, 7 aa, synthetic construct
YASNRCT

SEQ ID NO: 1623 - protein, 9 aa, synthetic construct
QQDYRSPLT

SEQ ID NO: 1624 - protein, 6 aa, synthetic construct
QSVSND

SEQ ID NO: 1625 - skipped

SEQ ID NO: 1626 - protein, 23 aa, synthetic construct
SIVMTQTPKFLLVSAGDRVTITC

SEQ ID NO: 1627 - protein, 32 aa, synthetic construct
GVPDRFTGSGYGTDFTFTISTVQAEDLAVYFC

SEQ ID NO: 1628 - protein, 10 aa, synthetic construct
FGAGTKLELK

SEQ ID NO: 1629 - protein, 107 aa, synthetic construct
SIVMTQTPKFLLVSAGDRVTITCKASQSVSNDVAWYQQKPGQSPKLLIYYASNRCTGVPDRFTGSGYGTDFTFTISTVQAEDLAVYFCQQDYRSPLTFGAGTKLELK

SEQ ID NO: 1630 - DNA, 321 bp, synthetic construct
  source 1..321: mol_type = other DNA
agtattgtgatgacccagactcccaaattcctgcttgtatcagcaggagacagggttaccataacctgcaaggccagtcagagtgtgagtaatgatgtagcttggtaccaacagaagccagggcagtctcctaaactgctaatatactatgcatccaatcgctgcactggagtccctgatcgcttcactggcagtggatatgggacggatttcactttcaccatcagcactgtacaggctgaagacctggcagtttatttctgtcagcaggattataggtctccgctcacgttcggtgctgggaccaagctggagctgaaa

SEQ ID NO: 1631 - protein, 7 aa, synthetic construct
  VARIANT 2: note = F or Y
  VARIANT 6: note = R or I
  VARIANT 7: note = Y or F
GXTFTXX

SEQ ID NO: 1632 - protein, 16 aa, synthetic construct
  VARIANT 9: note = N or S
  VARIANT 12: note = I or N
  VARIANT 14: note = Y or H
RSSQSLVHXNGXTXLY

SEQ ID NO: 1633 - protein, 7 aa, synthetic construct
  VARIANT 4: note = N or S
RVSXRFS

SEQ ID NO: 1634 - skipped

SEQ ID NO: 1635 - protein, 17 aa, synthetic construct
  VARIANT 1: note = N or K
  VARIANT 9: note = T or G
  VARIANT 11: note = F, Y, or N
  VARIANT 14: note = K or R
  VARIANT 17: note = N or S
XINPNNGGXDXNEXFKX

SEQ ID NO: 1636 - protein, 16 aa, synthetic construct
  VARIANT 9: note = N or S
  VARIANT 12: note = I or N
  VARIANT 14: note = Y or H
RSSQSLVHXNGXTXLY

SEQ ID NO: 1637 - protein, 8 aa, synthetic construct
  VARIANT 2: note = F or Y
  VARIANT 6: note = R or I
  VARIANT 7: note = Y or F
GXTFTXXW

SEQ ID NO: 1638 - protein, 8 aa, synthetic construct
  VARIANT 8: note = T or G
INPNNGGX

SEQ ID NO: 1639 - protein, 11 aa, synthetic construct
  VARIANT 6: note = N or S
  VARIANT 9: note = I or N
  VARIANT 11: note = Y or H
QSLVHXNGXTX

SEQ ID NO: 1640 - DNA, 54 bp, synthetic construct; identical to SEQ ID NO: 1134
  source 1..54: mol_type = other DNA

SEQ ID NO: 1641 - DNA, 75 bp, synthetic construct
  source 1..75: mol_type = other DNA
ggaagcggagtgaaacagactttgaattttgaccttctcaagttggcgggagacgtggagtccaaccctggacct

SEQ ID NO: 1642 - DNA, 66 bp, synthetic construct
  source 1..66: mol_type = other DNA
ggaagcggagctactaacttcagcctgctgaagcaggctggagacgtggaggagaaccctggacct

SEQ ID NO: 1643 - DNA, 18 bp, synthetic construct
  source 1..18: mol_type = other DNA
tccggaggcggcggcagc

SEQ ID NO: 1644 - DNA, 45 bp, synthetic construct
  source 1..45: mol_type = other DNA
ggtggtggtggtagcggcggcggcggctctggtggtggtggatcc

SEQ ID NO: 1645 - DNA, 75 bp, synthetic construct
  source 1..75: mol_type = other DNA
ggcggaggtggctccggaggcggaggcagcggcggaggtgggtctggcggaggcgggtgcggcggaggtggctcc

SEQ ID NO: 1646 - DNA, 609 bp, synthetic construct
  source 1..609: mol_type = other DNA
aattccgcccctctcccccccccccctctccctcccccccccctaacgttactggccgaagccgcttggaataaggccggtgtgcgtttgtctatatgttattttccaccatattgccgtcttttggcaatgtgagggcccggaaacctggccctgtcttcttgacgagcattcctaggggtctttcccctctcgccaaaggaatgcaaggtctgttgaatgtcgtgaaggaagcagttcctctggaagcttcttgaagacaaacaacgtctgtagcgaccctttgcaggcagcggaaccccccacctggcgacaggtgcctctgcggccaaaagccacgtgtataagatacacctgcaaaggcggcacaaccccagtgccacgttgtgagttggatagttgtggaaagagtcaaatggctctcctcaagcgtattcaacaaggggctgaaggatgcccagaaggtaccccattgtatgggatctgatctggggcctcggtgcacatgctttacatgtgtttagtcgaggttaaaaaaacgtctaggccccccgaaccacggggacgtggttttcctttgaaaaacacgatgataatatggccacaacc

SEQ ID NO: 1647 - DNA, 623 bp, synthetic construct
  source 1..623: mol_type = other DNA
taacgaattccgcccctctcccccccccccctctccctcccccccccctaacgttactggccgaagccgcttggaataaggccggtgtgcgtttgtctatatgttattttccaccatattgccgtcttttggcaatgtgagggcccggaaacctggccctgtcttcttgacgagcattcctaggggtctttcccctctcgccaaaggaatgcaaggtctgttgaatgtcgtgaaggaagcagttcctctggaagcttcttgaagacaaacaacgtctgtagcgaccctttgcaggcagcggaaccccccacctggcgacaggtgcctctgcggccaaaagccacgtgtataagatacacctgcaaaggcggcacaaccccagtgccacgttgtgagttggatagttgtggaaagagtcaaatggctctcctcaagcgtattcaacaaggggctgaaggatgcccagaaggtaccccattgtatgggatctgatctggggcctcggtgcacatgctttacatgtgtttagtcgaggttaaaaaaacgtctaggccccccgaaccacggggacgtggttttcctttgaaaaacacgatgataatatggccacaaccgccgccacc

SEQ ID NO: 1648 - DNA, 54 bp, synthetic construct
  source 1..54: mol_type = other DNA
gtggagaggaagtgctgcgtggagtgcccaccatgccctgcccctcctgtggcc

SEQ ID NO: 1649 - DNA, 108 bp, synthetic construct
  source 1..108: mol_type = other DNA
gagctcaaaaccccacttggtgacacaactcacacatgcccacggtgcccagagcccaaatcttgtgacacacctcccccgtgcccacggtgcccagcacctgaactc

SEQ ID NO: 1650 - DNA, 153 bp, synthetic construct
  source 1..153: mol_type = other DNA
gagctcaaaaccccacttggtgacacaactcacacatgcccacggtgcccagagcccaaatcttgtgacacacctcccccgtgcccacggtgcccagagcccaaatcttgtgacacacctcccccatgcccacggtgcccagcacctgaactc

SEQ ID NO: 1651 - DNA, 198 bp, synthetic construct
  source 1..198: mol_type = other DNA
gagctcaaaaccccacttggtgacacaactcacacatgcccacggtgcccagagcccaaatcttgtgacacacctcccccgtgcccacggtgcccagagcccaaatcttgtgacacacctcccccatgcccacggtgcccagagcccaaatcttgtgacacacctcccccgtgcccaaggtgcccagcacctgaactc

SEQ ID NO: 1652 - DNA, 45 bp, synthetic construct
  source 1..45: mol_type = other DNA
gtgcccagggattgtggttgtaagccttgcatatgtacagtccca

SEQ ID NO: 1653 - DNA, 18 bp, synthetic construct
  source 1..18: mol_type = other DNA
gtgcccagggattgtggt

SEQ ID NO: 1654 - DNA, 198 bp, synthetic construct
  source 1..198: mol_type = other DNA
gagctcaaaaccccacttggtgacacaactcacacatgcccacggtgcccagagcccaaatcttgtgacacacctcccccgtgcccacggtgcccagagcccaaatcttgtgacacaactcacacatgcccacggtgcccagagcccaaatcttgtgacacacctcccccgtgcccaaggtgcccagcacctgaactc

SEQ ID NO: 1655 - DNA, 15 bp, synthetic construct
  source 1..15: mol_type = other DNA
ggtggtggtggatcc

SEQ ID NO: 1656 - DNA, 30 bp, synthetic construct
  source 1..30: mol_type = other DNA
ggtggtggtggatccggtggtggtggatcc

SEQ ID NO: 1657 - DNA, 45 bp, synthetic construct
  source 1..45: mol_type = other DNA
ggtggtggtggatccggtggtggtggatccggtggtggtggatcc

SEQ ID NO: 1658 - DNA, 60 bp, synthetic construct
  source 1..60: mol_type = other DNA
ggtggtggtggatccggtggtggtggatccggtggtggtggatccggtggtggtggatcc

SEQ ID NO: 1659 - DNA, 75 bp, synthetic construct
  source 1..75: mol_type = other DNA
ggtggtggtggtagcggcggcggcggctctggtggtggtggatccggtggtggtggatccggtggtggtggatcc

SEQ ID NO: 1660 - DNA, 75 bp, synthetic construct
  source 1..75: mol_type = other DNA
ggtggtggtggatccggtggtggtggatccggtggtggtggatccggtggtggtggatccggtggtggtggatcc

SEQ ID NO: 1661 - DNA, 90 bp, synthetic construct
  source 1..90: mol_type = other DNA
ggtggtggtggtagcggcggcggcggctctggtggtggtggatccggtggtggtggatccggtggtggtggatccggtggtggtggatcc

SEQ ID NO: 1662 - DNA, 120 bp, synthetic construct
  source 1..120: mol_type = other DNA
ggtggtggtggtagcggcggcggcggctctggtggtggtggatccggtggtggtggatccggtggtggtggatccggtggtggtggatccggtggtggtggatccggtggtggtggatcc

SEQ ID NO: 1663 - DNA, 120 bp, synthetic construct
  source 1..120: mol_type = other DNA
ggtggtggtggatccggtggtggtggatccggtggtggtggatccggtggtggtggatccggtggtggtggatccggtggtggtggatccggtggtggtggatccggtggtggtggatcc

SEQ ID NO: 1664 - DNA, 60 bp, synthetic construct
  source 1..60: mol_type = other DNA
ggtggtggtggtagcggcggcggcggctctggtggtggtggatccggtggtggtggatcc

SEQ ID NO: 1665 - DNA, 90 bp, synthetic construct
  source 1..90: mol_type = other DNA
ggtggtggtggatccggtggtggtggatccggtggtggtggatccggtggtggtggatccggtggtggtggatccggtggtggtggatcc

SEQ ID NO: 1666 - DNA, 15 bp, synthetic construct
  source 1..15: mol_type = other DNA
ggaggaggaggaagt

SEQ ID NO: 1667 - DNA, 15 bp, synthetic construct
  source 1..15: mol_type = other DNA
ggaggtggaggttct

SEQ ID NO: 1668 - DNA, 45 bp, synthetic construct
  source 1..45: mol_type = other DNA
ggtggtggtggatccggaggaggaggaagtggaggtggaggttct

SEQ ID NO: 1669 - protein, 15 aa, synthetic construct
GGGGSGGGGSGGGGS

SEQ ID NO: 1670 - protein, 15 aa, synthetic construct
GGGGSGGGGSGGGGS

SEQ ID NO: 1671 - protein, 9 aa, synthetic construct
GSGSPHSKA

SEQ ID NO: 1672 - protein, 9 aa, synthetic construct
GHDSPHKSG

SEQ ID NO: 1673 - protein, 4 aa, synthetic construct
SPHS

SEQ ID NO: 1674 - protein, 5 aa, synthetic construct
SPHSK

SEQ ID NO: 1675 - protein, 4 aa, synthetic construct
HDSP

SEQ ID NO: 1676 - protein, 5 aa, synthetic construct
HDSPH

SEQ ID NO: 1677 - protein, 5 aa, synthetic construct
SPHKS

SEQ ID NO: 1678 - protein, 5 aa, synthetic construct
SPHAR

SEQ ID NO: 1679 - protein, 5 aa, synthetic construct
SPHVK

SEQ ID NO: 1680 - protein, 5 aa, synthetic construct
SPHAS

SEQ ID NO: 1681 - protein, 5 aa, synthetic construct
SPHKK

SEQ ID NO: 1682 - protein, 5 aa, synthetic construct
SPHVR

SEQ ID NO: 1683 - protein, 5 aa, synthetic construct
SPHRK

SEQ ID NO: 1684 - protein, 5 aa, synthetic construct
SPHKT

SEQ ID NO: 1685 - protein, 5 aa, synthetic construct
SPHKF

SEQ ID NO: 1686 - protein, 5 aa, synthetic construct
SPHKI

SEQ ID NO: 1687 - protein, 5 aa, synthetic construct
SPHKL

SEQ ID NO: 1688 - protein, 5 aa, synthetic construct
SPHKY

SEQ ID NO: 1689 - protein, 5 aa, synthetic construct
SPHTR

SEQ ID NO: 1690 - protein, 5 aa, synthetic construct
SPHKR

SEQ ID NO: 1691 - protein, 5 aa, synthetic construct
SPHGA

SEQ ID NO: 1692 - protein, 5 aa, synthetic construct
SPHSR

SEQ ID NO: 1693 - protein, 5 aa, synthetic construct
SPHSL

SEQ ID NO: 1694 - protein, 5 aa, synthetic construct
SPHSS

SEQ ID NO: 1695 - protein, 5 aa, synthetic construct
SPHFL

SEQ ID NO: 1696 - protein, 5 aa, synthetic construct
SPHWK

SEQ ID NO: 1697 - protein, 5 aa, synthetic construct
SPHGK

SEQ ID NO: 1698 - protein, 5 aa, synthetic construct
SPHTK

SEQ ID NO: 1699 - protein, 5 aa, synthetic construct
SPHNK

SEQ ID NO: 1700 - protein, 5 aa, synthetic construct
SPHAK

SEQ ID NO: 1701 - protein, 5 aa, synthetic construct
SPHKH

SEQ ID NO: 1702 - protein, 5 aa, synthetic construct
SPHKM

SEQ ID NO: 1703 - protein, 5 aa, synthetic construct
SPHRS

SEQ ID NO: 1704 - protein, 6 aa, synthetic construct
SPHSKT

SEQ ID NO: 1705 - protein, 6 aa, synthetic construct
SPHSKG

SEQ ID NO: 1706 - protein, 6 aa, synthetic construct
SPHGKA

SEQ ID NO: 1707 - protein, 6 aa, synthetic construct
SPHNKA

SEQ ID NO: 1708 - protein, 6 aa, synthetic construct
SPHSKN

SEQ ID NO: 1709 - protein, 6 aa, synthetic construct
SPHAKA

SEQ ID NO: 1710 - protein, 6 aa, synthetic construct
SPHSKV

SEQ ID NO: 1711 - protein, 6 aa, synthetic construct
SPHKTG

SEQ ID NO: 1712 - protein, 6 aa, synthetic construct
SPHTKA

SEQ ID NO: 1713 - protein, 6 aa, synthetic construct
SPHKSL

SEQ ID NO: 1714 - protein, 6 aa, synthetic construct
SPHKSE

SEQ ID NO: 1715 - protein, 6 aa, synthetic construct
SPHKSV

SEQ ID NO: 1716 - protein, 6 aa, synthetic construct
SPHKSW

SEQ ID NO: 1717 - protein, 6 aa, synthetic construct
SPHKSN

SEQ ID NO: 1718 - protein, 6 aa, synthetic construct
SPHKHG

SEQ ID NO: 1719 - protein, 6 aa, synthetic construct
SPHKSQ

SEQ ID NO: 1720 - protein, 6 aa, synthetic construct
SPHKSK

SEQ ID NO: 1721 - protein, 6 aa, synthetic construct
SPHKLW

SEQ ID NO: 1722 - protein, 6 aa, synthetic construct
SPHWKG

SEQ ID NO: 1723 - protein, 6 aa, synthetic construct
SPHKMG

SEQ ID NO: 1724 - protein, 6 aa, synthetic construct
SPHKMA

SEQ ID NO: 1725 - protein, 5 aa, synthetic construct
SGSPH

SEQ ID NO: 1726 - protein, 5 aa, synthetic construct
QDSPH

SEQ ID NO: 1727 - protein, 5 aa, synthetic construct
RGSPH

SEQ ID NO: 1728 - protein, 5 aa, synthetic construct
SHSPH

SEQ ID NO: 1729 - protein, 5 aa, synthetic construct
QSSPH

SEQ ID NO: 1730 - protein, 5 aa, synthetic construct
DDSPH

SEQ ID NO: 1731 - protein, 5 aa, synthetic construct
HESPH

SEQ ID NO: 1732 - protein, 5 aa, synthetic construct
NYSPH

SEQ ID NO: 1733 - protein, 5 aa, synthetic construct
VGSPH

SEQ ID NO: 1734 - protein, 5 aa, synthetic construct
SCSPH

SEQ ID NO: 1735 - protein, 5 aa, synthetic construct
LLSPH

SEQ ID NO: 1736 - protein, 5 aa, synthetic construct
NGSPH

SEQ ID NO: 1737 - protein, 5 aa, synthetic construct
PGSPH

SEQ ID NO: 1738 - protein, 5 aa, synthetic construct
GGSPH

SEQ ID NO: 1739 - protein, 5 aa, synthetic construct
TGSPH

SEQ ID NO: 1740 - DNA, 57 bp, synthetic construct; identical to SEQ ID NO: 1083
  source 1..57: mol_type = other DNA

SEQ ID NO: 1741 - DNA, 57 bp, synthetic construct; identical to SEQ ID NO: 1084
  source 1..57: mol_type = other DNA

SEQ ID NO: 1742 - DNA, 969 bp, synthetic construct; identical to SEQ ID NO: 1132
  source 1..969: mol_type = other DNA

SEQ ID NO: 1743 - DNA, 972 bp, synthetic construct
  source 1..972: mol_type = other DNA
gccaaaacgacacccccatctgtctatccactggcccctggatctgctgcccaaactaactccatggtgaccctgggatgcctggtcaagggctatttccctgagccagtgacagtgacctggaactctggatccctgtccagcggtgtgcacaccttcccagctgtcctgcagtctgacctctacactctgagcagctcagtgactgtcccctccagcacctggcccagcgagaccgtcacctgcaacgttgcccacccggccagcagcaccaaggtggacaagaaaattgtgcccagggattgtggttgtaagccttgcatatgtacagtcccagaagtatcatctgtcttcatcttccccccaaagcccaaggatgtgctcaccattactctgactcctaaggtcacgtgtgttgtggtagacatcagcaaggatgatcccgaggtccagttcagctggtttgtagatgatgtggaggtgcacacagctcagacgcaaccccgggaggagcagttcaacagcactttccgctcagtcagtgaacttcccatcatgcaccaggactggctcaatggcaaggagttcaaatgcagggtcaacagtgcagctttccctgcccccatcgagaaaaccatctccaaaaccaaaggcagaccgaaggctccacaggtgtacaccattccacctcccaaggagcagatggccaaggataaagtcagtctgacctgcatgataacagacttcttccctgaagacattactgtggagtggcagtggaatgggcagccagcggagaactacaagaacactcagcccatcatggacacagatggctcttacttcgtctacagcaagctcaatgtgcagaagagcaactgggaggcaggaaatactttcacctgctctgtgttacatgagggcctgcacaaccaccatactgagaagagcctctcccactctcctggtaag

SEQ ID NO: 1744 - protein, 10 aa, synthetic construct
GFNIKDYYIH

SEQ ID NO: 1745 - protein, 16 aa, synthetic construct
WIDPENGDTEYAPKFQ

SEQ ID NO: 1746 - protein, 4 aa, synthetic construct
APGY

SEQ ID NO: 1747 - protein, 16 aa, synthetic construct
NIDPSDSETHYNQKFK

SEQ ID NO: 1748 - protein, 11 aa, synthetic construct
SGFTFTDYYMS

SEQ ID NO: 1749 - protein, 16 aa, synthetic construct
NRNKTKGYTTEYSASV

SEQ ID NO: 1750 - protein, 4 aa, synthetic construct
GMDY

SEQ ID NO: 1751 - protein, 10 aa, synthetic construct
GFTFSTYPMS

SEQ ID NO: 1752 - protein, 14 aa, synthetic construct
SISNGGSTYYPDTV

SEQ ID NO: 1753 - protein, 8 aa, synthetic construct
GRDYHFDF

SEQ ID NO: 1754 - protein, 18 aa, synthetic construct
KAEIGHDSPHKSGQNQQT

SEQ ID NO: 1755 - protein, 16 aa, synthetic construct
IYPGSTRANYNEKFKS

SEQ ID NO: 1756 - protein, 4 aa, synthetic construct
THSI

SEQ ID NO: 1757 - protein, 10 aa, synthetic construct
GYTFISNWMH

SEQ ID NO: 1758 - protein, 16 aa, synthetic construct
IDPSDSETHYNQKFKD

SEQ ID NO: 1759 - protein, 10 aa, synthetic construct
RDRDGYYFDY

SEQ ID NO: 1760 - protein, 15 aa, synthetic construct
IYPGSTRANYNEKFK

SEQ ID NO: 1761 - protein, 13 aa, synthetic construct
KASGYTFTDRTIH

SEQ ID NO: 1762 - protein, 16 aa, synthetic construct
YIYPGDGSTKYNENFK

SEQ ID NO: 1763 - protein, 6 aa, synthetic construct
RGAMDY

SEQ ID NO: 1764 - protein, 16 aa, synthetic construct
YIYPGDDSTKYNDNFK

SEQ ID NO: 1765 - protein, 6 aa, synthetic construct
RGTMDY

SEQ ID NO: 1766 - protein, 13 aa, synthetic construct
KASGNTFTDYEIH

SEQ ID NO: 1767 - protein, 16 aa, synthetic construct
AIDPETGNTAYNQKFK

SEQ ID NO: 1768 - protein, 6 aa, synthetic construct
SRGFDY

SEQ ID NO: 1769 - protein, 5 aa, synthetic construct
SYGMS

SEQ ID NO: 1770 - protein, 5 aa, synthetic construct
KYGMS

SEQ ID NO: 1771 - protein, 17 aa, synthetic construct
TISSSGSRTYFPDSVKG

SEQ ID NO: 1772 - protein, 17 aa, synthetic construct
TISSSGSRTYYPDSVKG

SEQ ID NO: 1773 - protein, 32 aa, synthetic construct
RFTISRDNAKNTLYLQMSSSKSEDTAMYYCSI

SEQ ID NO: 1774 - protein, 8 aa, synthetic construct
TWDGAMDY

SEQ ID NO: 1775 - protein, 8 aa, synthetic construct
SWDGAMDY

SEQ ID NO: 1776 - protein, 11 aa, synthetic construct
WGQGTSVTVSS

SEQ ID NO: 1777 - protein, 14 aa, synthetic construct
WVRQAPGKGLEWVA

SEQ ID NO: 1778 - protein, 32 aa, synthetic construct
  VARIANT 18: note = Any amino acid
  VARIANT 20: note = Any amino acid
  VARIANT 21: note = Any amino acid
  VARIANT 22: note = Any amino acid
  VARIANT 31: note = Any amino acid
RFTISRDNAKNTLYLQMXSXXXEDTAMYYCXI

SEQ ID NO: 1779 - protein, 11 aa, synthetic construct
  VARIANT 6: note = Any amino acid
WGQGTXVTVSS

SEQ ID NO: 1780 - protein, 13 aa, synthetic construct
KGSGYTFSNYWIE

SEQ ID NO: 1781 - protein, 17 aa, synthetic construct
EILPGSDSIKYEKNFKG

SEQ ID NO: 1782 - protein, 9 aa, synthetic construct
ARRGNYVDD

SEQ ID NO: 1783 - protein, 7 aa, synthetic construct
GYTFSSS

SEQ ID NO: 1784 - protein, 5 aa, synthetic construct
SSWMG

SEQ ID NO: 1785 - protein, 6 aa, synthetic construct
LPGSGG

SEQ ID NO: 1786 - protein, 17 aa, synthetic construct
DILPGSGGTNYNERFKG

SEQ ID NO: 1787 - protein, 9 aa, synthetic construct
SYYDYDRFA

SEQ ID NO: 1788 - protein, 10 aa, synthetic construct
SYYDYDRFAN

SEQ ID NO: 1789 - protein, 7 aa, synthetic construct
GFTFSSY

SEQ ID NO: 1790 - protein, 5 aa, synthetic construct
SYAMS

SEQ ID NO: 1791 - protein, 5 aa, synthetic construct
SKGGN

SEQ ID NO: 1792 - protein, 16 aa, synthetic construct
SISKGGNTYYPNSVKG

SEQ ID NO: 1793 - protein, 9 aa, synthetic construct
GWGDYGWFA

SEQ ID NO: 1794 - protein, 10 aa, synthetic construct
GWGDYGWFAY

SEQ ID NO: 1795 - protein, 125 aa, synthetic construct
LPEVQLEESGAELVRSGASVTLSCTASGFNIKDYYIHWVKQRPEQGLEWIGWIDPENGDTEYAPKFQGKATMTADTSSNTAYLQLSSLTSEDTAVYYCNGAPGYWGPGTTLTVSSAKTTPPSVYS

SEQ ID NO: 1796 - protein, 131 aa, synthetic construct
LPEVQLEQSGAELVKPGASVKLSCKASGYTFISNWMHWVKQRPGQGLEWIGNIDPSDSETHYNQKFKDKATLTVDKSSSTAYMQLSSLTSEDSAVYYCARRDRDGYYFDYWGQGTTLTVSSAKTTPPSVYS

SEQ ID NO: 1797 - protein, 127 aa, synthetic construct
LPEVQLEESGGGLVQPGGSLSLSCAASGFTFTDYYMSWVRQPPGKALEWVALNRNKTKGYTTEYSASVKGRFTISRDNSQSILYLQMNALRAEDSATYYCARGMDYWGQGTSVTVSSAKTTPPSVYS

SEQ ID NO: 1798 - protein, 128 aa, synthetic construct
LPEVQLEESGGGLVKPGGSLKLSCAASGFTFSTYPMSWVRQTPEKRLEWVASISNGGSTYYPDTVKGRFTISRDNARNILYLQMSSLRSEDTAMYYCARGRDYHFDFWGQGTTLTVSSAKTTPPSVYS

SEQ ID NO: 1799 - protein, 125 aa, synthetic construct
LPQVQLEESGAELVKPGASVKLSCKASGYTFTNYWINWVKQRPGQGLEWIGNIYPGSTRANYNEKFKSKATLTVDTSSSTAYMQVSSLTSDDSAVYYCTRTHSIWGQGTQVTVSAAKTTPPSVYS

SEQ ID NO: 1800 - protein, 13 aa, synthetic construct
GHDSPHKSGQNQQ

SEQ ID NO: 1801 - protein, 13 aa, synthetic construct
GSGSPHSKAQNQQ

SEQ ID NO: 1802 - protein, 13 aa, synthetic construct
GSGSPHSKAQNRH

SEQ ID NO: 1803 - protein, 13 aa, synthetic construct
GSGSPHSKVQNQQ

SEQ ID NO: 1804 - protein, 13 aa, synthetic construct
MSGSPHSKAQNQQ

SEQ ID NO: 1805 - protein, 13 aa, synthetic construct
GRGSPHSKAQNQQ

SEQ ID NO: 1806 - protein, 13 aa, synthetic construct
RNGSPHSKAQNQQ

SEQ ID NO: 1807 - protein, 13 aa, synthetic construct
GSGSPHSKARDQQ

SEQ ID NO: 1808 - protein, 13 aa, synthetic construct
GSGSPHSKAPNLQ

SEQ ID NO: 1809 - protein, 13 aa, synthetic construct
TSGSPHSKAQNQQ

SEQ ID NO: 1810 - protein, 13 aa, synthetic construct
GSGSPHSKAHVRQ

SEQ ID NO: 1811 - protein, 13 aa, synthetic construct
GSGSPHSKAPNQH

SEQ ID NO: 1812 - protein, 13 aa, synthetic construct
ISGSPHSKAQNQQ

SEQ ID NO: 1813 - protein, 13 aa, synthetic construct
GPGSPHSKAHNQQ

SEQ ID NO: 1814 - protein, 13 aa, synthetic construct
GSGSPHSKTQSQQ

SEQ ID NO: 1815 - protein, 13 aa, synthetic construct
ESGSPHSKAQNQQ

SEQ ID NO: 1816 - protein, 13 aa, synthetic construct
GSGSPHSKAQPAK

SEQ ID NO: 1817 - protein, 13 aa, synthetic construct
SSGSPHSKAQNQQ

SEQ ID NO: 1818 - protein, 13 aa, synthetic construct
GNGSPHSKAQNQQ

SEQ ID NO: 1819 - protein, 13 aa, synthetic construct
GSGSPHSKSQTQQ

SEQ ID NO: 1820 - protein, 13 aa, synthetic construct
ASGSPHSKAQNQQ

SEQ ID NO: 1821 - protein, 13 aa, synthetic construct
GSGSPHSKAQNLA

SEQ ID NO: 1822 - protein, 13 aa, synthetic construct
GSGSPHSKSQNQL

SEQ ID NO: 1823 - protein, 13 aa, synthetic construct
NSGSPHSKAQNQQ

SEQ ID NO: 1824 - protein, 13 aa, synthetic construct
GSGSPHSKAQGQQ

SEQ ID NO: 1825 - protein, 13 aa, synthetic construct
VSGSPHSKAQNQQ

SEQ ID NO: 1826 - protein, 13 aa, synthetic construct
GSGSPHSKALNRQ

SEQ ID NO: 1827 - protein, 13 aa, synthetic construct
LSGSPHSKAQNQQ

SEQ ID NO: 1828 - protein, 13 aa, synthetic construct
GSGSPHSKAHNQQ

SEQ ID NO: 1829 - protein, 13 aa, synthetic construct
GSGSPHSKTQNQQ

SEQ ID NO: 1830 - protein, 13 aa, synthetic construct
GGGSPHSKAQTQQ

SEQ ID NO: 1831 - protein, 13 aa, synthetic construct
GSGSPHSKAQNPP

SEQ ID NO: 1832 - protein, 13 aa, synthetic construct
GSGSPHSKAQNLQ

SEQ ID NO: 1833 - protein, 13 aa, synthetic construct
GGGSPHSKAQNQQ

SEQ ID NO: 1834 - protein, 13 aa, synthetic construct
GSGSPHSKAQYQQ

SEQ ID NO: 1835 - protein, 13 aa, synthetic construct
GGGSPHSKAQNKQ

SEQ ID NO: 1836 - protein, 13 aa, synthetic construct
GSGSPHSKAQDQE

SEQ ID NO: 1837 - protein, 13 aa, synthetic construct
KSGSPHSKAQNQQ

SEQ ID NO: 1838 - protein, 13 aa, synthetic construct
GGGSPHSKAQNQL

SEQ ID NO: 1839 - protein, 13 aa, synthetic construct
GSGSPHSKAQNHQ

SEQ ID NO: 1840 - protein, 13 aa, synthetic construct
GSGSPHSKAQDQQ

SEQ ID NO: 1841 - protein, 13 aa, synthetic construct
GGGSPHSKSQNQL

SEQ ID NO: 1842 - protein, 13 aa, synthetic construct
GNGSPHSKAQNKQ

SEQ ID NO: 1843 - protein, 13 aa, synthetic construct
GSGSPHSKGHWQQ

SEQ ID NO: 1844 - protein, 13 aa, synthetic construct
GSGSPHSKAPNQQ

SEQ ID NO: 1845 - protein, 13 aa, synthetic construct
GSGSPHSKAQNQL

SEQ ID NO: 1846 - protein, 13 aa, synthetic construct
GSGSPHSKRPEQQ

SEQ ID NO: 1847 - protein, 13 aa, synthetic construct
GSGSPHSKAQRTM

SEQ ID NO: 1848 - protein, 13 aa, synthetic construct
GNGSPHSKAQNQH

SEQ ID NO: 1849 - protein, 13 aa, synthetic construct
HSGSPHSKAQNQQ

SEQ ID NO: 1850 - protein, 13 aa, synthetic construct
GGGSPHSKALNQQ

SEQ ID NO: 1851 - protein, 13 aa, synthetic construct
GSGSPHSKALHQH

SEQ ID NO: 1852 - protein, 13 aa, synthetic construct
GTGSPHSKAQNHQ

SEQ ID NO: 1853 - protein, 13 aa, synthetic construct
GSGSPHSKAQHRI

SEQ ID NO: 1854 - protein, 13 aa, synthetic construct
GSGSPHSKAQYIH

SEQ ID NO: 1855 - protein, 13 aa, synthetic construct
GGGSPHSKAHNQQ

SEQ ID NO: 1856 - protein, 13 aa, synthetic construct
GSGSPHSKAQKFE

SEQ ID NO: 1857 - protein, 13 aa, synthetic construct
ESGSPHSKAQNHQ

SEQ ID NO: 1858 - protein, 13 aa, synthetic construct
GSGSPHSKAQFPS

SEQ ID NO: 1859 - protein, 13 aa, synthetic construct
PSGSPHSKAQNQQ

SEQ ID NO: 1860 - protein, 13 aa, synthetic construct
GNGSPHSKAQNPL

SEQ ID NO: 1861 - protein, 13 aa, synthetic construct
GGGSPHSKAQSQQ

SEQ ID NO: 1862 - protein, 13 aa, synthetic construct
GSGSPHSKAQAIK

SEQ ID NO: 1863 - protein, 13 aa, synthetic construct
GSGSPHSKGQNRQ

SEQ ID NO: 1864 - protein, 13 aa, synthetic construct
GSGSPHSKAQSQQ

SEQ ID NO: 1865 - protein, 13 aa, synthetic construct
GSVSPHGKAQNQL

SEQ ID NO: 1866 - protein, 13 aa, synthetic construct
ASGSPHSKAQNQL

SEQ ID NO: 1867 - protein, 13 aa, synthetic construct
RSGSPHSKAQNQQ

SEQ ID NO: 1868 - protein, 13 aa, synthetic construct
GSGSPHSKAQYQH

SEQ ID NO: 1869 - protein, 13 aa, synthetic construct
GSGSPHTKAQNPQ

SEQ ID NO: 1870 - protein, 13 aa, synthetic construct
GSGSPHSKGQNPP

SEQ ID NO: 1871 - protein, 13 aa, synthetic construct
GSGSPHSKAQHQL

SEQ ID NO: 1872 - protein, 13 aa, synthetic construct
GSGSPHSKAQSPP

SEQ ID NO: 1873 - protein, 13 aa, synthetic construct
GSGSPHSKAQAKL

SEQ ID NO: 1874 - protein, 13 aa, synthetic construct
GSGSPHSKTKSQQ

SEQ ID NO: 1875 - protein, 13 aa, synthetic construct
GSGSPHSKAQDRP

SEQ ID NO: 1876 - protein, 13 aa, synthetic construct
GIGSPHSKAQNLG

SEQ ID NO: 1877 - protein, 13 aa, synthetic construct
GSGSPHSKAQAFH

SEQ ID NO: 1878 - protein, 13 aa, synthetic construct
GSGSPHSKAQKQQ

SEQ ID NO: 1879 - protein, 13 aa, synthetic construct
GSGSPHSKAQNAQ

SEQ ID NO: 1880 - protein, 13 aa, synthetic construct
WSGSPHSKAQNQQ

SEQ ID NO: 1881 - protein, 13 aa, synthetic construct
GSGSPHSKAHNQL

SEQ ID NO: 1882 - protein, 13 aa, synthetic construct
GNGSPHSKAQNHQ

SEQ ID NO: 1883 - protein, 13 aa, synthetic construct
GGGSPHSKAQNLQ

SEQ ID NO: 1884 - protein, 13 aa, synthetic construct
GSGSPHSKAQKLN

SEQ ID NO: 1885 - protein, 13 aa, synthetic construct
GGGSPHSKSQNQH

SEQ ID NO: 1886 - protein, 13 aa, synthetic construct
GSGSPHSKSQNVQ

SEQ ID NO: 1887 - protein, 13 aa, synthetic construct
GSGSPHSKAQAQQ

SEQ ID NO: 1888 - protein, 13 aa, synthetic construct
DSGSPHSKAQNQQ

SEQ ID NO: 1889 - protein, 13 aa, synthetic construct
ASGSPHSKAPNQQ

SEQ ID NO: 1890 - protein, 13 aa, synthetic construct
GSGSPHSKAQTPP

SEQ ID NO: 1891 - protein, 13 aa, synthetic construct
IDGSPHSKAQNQQ

SEQ ID NO: 1892 - protein, 13 aa, synthetic construct
GSGSPHNKAQNHQ

SEQ ID NO: 1893 - protein, 13 aa, synthetic construct
GSGSPHSKAQPPA

SEQ ID NO: 1894 - protein, 13 aa, synthetic construct
GSGSPHSKAQERP

SEQ ID NO: 1895 - protein, 13 aa, synthetic construct
GSGSPHSKAQDLQ

SEQ ID NO: 1896 - protein, 13 aa, synthetic construct
GGGSPHSKAQNPP

SEQ ID NO: 1897 - protein, 13 aa, synthetic construct
GSGSPHSKAQAMH

SEQ ID NO: 1898 - protein, 13 aa, synthetic construct
GSGSPHSKALNQQ

SEQ ID NO: 1899 - protein, 13 aa, synthetic construct
GSGSPHSKAQHPS

SEQ ID NO: 1900 - protein, 13 aa, synthetic construct
GLGSPHSKSQNQQ

SEQ ID NO: 1901 - protein, 13 aa, synthetic construct
GTGSPHSKAQNQQ

SEQ ID NO: 1902 - protein, 13 aa, synthetic construct
GSGSPHSKAPGLQ

SEQ ID NO: 1903 - protein, 13 aa, synthetic construct
GSGSPHSKAQGIR

SEQ ID NO: 1904 - protein, 13 aa, synthetic construct
GSGSPHSKAQAPA

SEQ ID NO: 1905 - protein, 13 aa, synthetic construct
GSGSPHSKSQSQQ

SEQ ID NO: 1906 - protein, 13 aa, synthetic construct
GSGSPHSKAQIPP

SEQ ID NO: 1907 - protein, 13 aa, synthetic construct
GSGSPHSKAQTQL

SEQ ID NO: 1908 - protein, 13 aa, synthetic construct
GSGSPHSKAQAPS

SEQ ID NO: 1909 - protein, 13 aa, synthetic construct
DAGSPHSKAQNQQ

SEQ ID NO: 1910 - protein, 13 aa, synthetic construct
GSGSPHSKGQNQQ

SEQ ID NO: 1911 - protein, 13 aa, synthetic construct
DGGSPHSKAQNQQ

SEQ ID NO: 1912 - protein, 13 aa, synthetic construct
ASGSPHSKAHNQQ

SEQ ID NO: 1913 - protein, 13 aa, synthetic construct
GSGSPHSKAQNTY

SEQ ID NO: 1914 - protein, 13 aa, synthetic construct
GSGSPHSKSQNQH

SEQ ID NO: 1915 - protein, 13 aa, synthetic construct
GGGSPHSKAQDKQ

SEQ ID NO: 1916 - protein, 13 aa, synthetic construct
GSGSPHSKAQNHL

SEQ ID NO: 1917 - protein, 13 aa, synthetic construct
GSGSPHSKAQIGM

SEQ ID NO: 1918 - protein, 13 aa, synthetic construct
GSGSPHSKALNKQ

SEQ ID NO: 1919 - protein, 13 aa, synthetic construct
GGGSPHSKAQNPQ

SEQ ID NO: 1920 - protein, 13 aa, synthetic construct
GTGSPHSKAPNQL

SEQ ID NO: 1921 - protein, 13 aa, synthetic construct
GSGSPHSKAQLQQ

SEQ ID NO: 1922 - protein, 13 aa, synthetic construct
GGGSPHSKAQYQQ

SEQ ID NO: 1923 - protein, 13 aa, synthetic construct
GGGSPHSKAQHQQ

SEQ ID NO: 1924 - protein, 13 aa, synthetic construct
GSGSPHSKAQRMS

SEQ ID NO: 1925 - protein, 13 aa, synthetic construct
GSGSPHSKAQGIL

SEQ ID NO: 1926 - protein, 13 aa, synthetic construct
GSGSPHSKAQDRQ

SEQ ID NO: 1927 - protein, 13 aa, synthetic construct
GSGSPHSKARDWQ

SEQ ID NO: 1928 - protein, 13 aa, synthetic construct
GSGSPHSKAQNTH

SEQ ID NO: 1929 - protein, 13 aa, synthetic construct
GSGSPHSKAQERS

SEQ ID NO: 1930 - protein, 13 aa, synthetic construct
GSGSPHSKAQNYQ

SEQ ID NO: 1931 - protein, 13 aa, synthetic construct
GSGSPHSKAQRTC

SEQ ID NO: 1932 - protein, 13 aa, synthetic construct
GSGSPHSKAQIGH

SEQ ID NO: 1933 - protein, 13 aa, synthetic construct
GSGSPHSKAQGAI

SEQ ID NO: 1934 - protein, 13 aa, synthetic construct
GSGSPHSKAQVPP

SEQ ID NO: 1935 - protein, 13 aa, synthetic construct
GSGSPHSKAQVQQ

SEQ ID NO: 1936 - protein, 13 aa, synthetic construct
GSGSPHSKALMRQ

SEQ ID NO: 1937 - protein, 13 aa, synthetic construct
GSGSPHSKAQYSV

SEQ ID NO: 1938 - protein, 13 aa, synthetic construct
GSGSPHSKVPNLQ

SEQ ID NO: 1939 - protein, 13 aa, synthetic construct
GSGSPHSKAQAIT

SEQ ID NO: 1940 - protein, 13 aa, synthetic construct
GSGSPHSKAQKTL

SEQ ID NO: 1941 - protein, 13 aa, synthetic construct
GSGSPHSKAQNQW

SEQ ID NO: 1942 - protein, 13 aa, synthetic construct
GSGSPHSKAQLHH

SEQ ID NO: 1943 - protein, 13 aa, synthetic construct
GSGSPHSKAQNII

SEQ ID NO: 1944 - protein, 13 aa, synthetic construct
MEGSPHSKAQNQQ

SEQ ID NO: 1945 - protein, 13 aa, synthetic construct
GSGSPHSKAQGHH

SEQ ID NO: 1946 - protein, 13 aa, synthetic construct
GSGSPHSKAQSKV

SEQ ID NO: 1947 - protein, 13 aa, synthetic construct
GSGSPHSKAQLPS

SEQ ID NO: 1948 - protein, 13 aa, synthetic construct
GSGSPHSKAIGKQ

SEQ ID NO: 1949 - protein, 13 aa, synthetic construct
GGGSPHSKSQNQQ

SEQ ID NO: 1950 - protein, 13 aa, synthetic construct
GSGSPHSKAQAIH

SEQ ID NO: 1951 - protein, 13 aa, synthetic construct
GSGSPHSKAQHGL

SEQ ID NO: 1952 - protein, 13 aa, synthetic construct
GSGSPHSKAQFMC

SEQ ID NO: 1953 - protein, 13 aa, synthetic construct
VSGSPHSKAQGQQ

SEQ ID NO: 1954 - protein, 13 aa, synthetic construct
GGGSPHSKAQNQM

SEQ ID NO: 1955 - protein, 13 aa, synthetic construct
GSGSPHSKAQHLQ

SEQ ID NO: 1956 - protein, 13 aa, synthetic construct
ENGSPHSKAQNQQ

SEQ ID NO: 1957 - protein, 13 aa, synthetic construct
GSGSPHSKTQNHQ

SEQ ID NO: 1958 - protein, 13 aa, synthetic construct
GSGSPHSKAQPAR

SEQ ID NO: 1959 - protein, 13 aa, synthetic construct
GSGSPHSKAQSLQ

SEQ ID NO: 1960 - protein, 13 aa, synthetic construct
GSGSPHSKSQSQL

SEQ ID NO: 1961 - protein, 13 aa, synthetic construct
GSASPHSKAHSQQ

SEQ ID NO: 1962 - protein, 13 aa, synthetic construct
GSGSPHSKAQMPS

SEQ ID NO: 1963 - protein, 13 aa, synthetic construct
GSGSPHSKAQGSL

SEQ ID NO: 1964 - protein, 13 aa, synthetic construct
GSGSPHSKSQNQQ

SEQ ID NO: 1965 - protein, 13 aa, synthetic construct
GNGSPHSKSQNQQ

SEQ ID NO: 1966 - protein, 13 aa, synthetic construct
GSGSPHSKAQVPA

SEQ ID NO: 1967 - protein, 13 aa, synthetic construct
GNGSPHSKAQNLQ

SEQ ID NO: 1968 - protein, 13 aa, synthetic construct
GSGSPHSKAQDKQ

SEQ ID NO: 1969 - protein, 13 aa, synthetic construct
GSGSPHSKAHYQQ

SEQ ID NO: 1970 - protein, 13 aa, synthetic construct
GSGSPHSKAQVPS

SEQ ID NO: 1971 - protein, 13 aa, synthetic construct
GGGSPHSKAQNHQ

SEQ ID NO: 1972 - protein, 13 aa, synthetic construct
GSGSPHSKARGEQ

SEQ ID NO: 1973 - protein, 13 aa, synthetic construct
GGGSPHSKAQYQH

SEQ ID NO: 1974 - protein, 13 aa, synthetic construct
GSGSPHSKAPGQQ

SEQ ID NO: 1975 - protein, 13 aa, synthetic construct
KNGSPHSKAQNQQ

SEQ ID NO: 1976 - protein, 13 aa, synthetic construct
GSGSPHSKRLEQQ

SEQ ID NO: 1977 - protein, 13 aa, synthetic construct
GSGSPHSKAQNQS

SEQ ID NO: 1978 - protein, 13 aa, synthetic construct
GSGSPHSKAQKVI

SEQ ID NO: 1979 - protein, 13 aa, synthetic construct
GSGSPHSKAQNND

SEQ ID NO: 1980 - protein, 13 aa, synthetic construct
GSGSPHSKAQSVH

SEQ ID NO: 1981 - protein, 13 aa, synthetic construct
GSGSPHSKAQPLG

SEQ ID NO: 1982 - protein, 13 aa, synthetic construct
KEGSPHSKAQNQQ

SEQ ID NO: 1983 - protein, 13 aa, synthetic construct
GSGSPHSKAHNQE

SEQ ID NO: 1984 - protein, 13 aa, synthetic construct
GSGSPHSKAQIQQ

SEQ ID NO: 1985 - protein, 13 aa, synthetic construct
GSGSPHSKAQVRN

SEQ ID NO: 1986 - protein, 13 aa, synthetic construct
GSGSPHSKAPSNQ

SEQ ID NO: 1987 - protein, 13 aa, synthetic construct
GSGSPHSKAQVGH

SEQ ID NO: 1988 - protein, 13 aa, synthetic construct
GSGSPHSKAQRDI

SEQ ID NO: 1989 - protein, 13 aa, synthetic construct
GSGSPHSKAQMPN

SEQ ID NO: 1990 - protein, 13 aa, synthetic construct
AIGSPHSKAQNQQ

SEQ ID NO: 1991 - protein, 13 aa, synthetic construct
GSGSPHSKARGLQ

SEQ ID NO: 1992 - protein, 13 aa, synthetic construct
GSGSPHSKLQKQQ

SEQ ID NO: 1993 - protein, 13 aa, synthetic construct
GSGSPHSKAPSLQ

SEQ ID NO: 1994 - protein, 13 aa, synthetic construct
GSGSPHSKAQRDQ

SEQ ID NO: 1995 - protein, 13 aa, synthetic construct
GSGSPHSKNRDQQ

SEQ ID NO: 1996 - protein, 13 aa, synthetic construct
GSGSPHSKAQAKG

SEQ ID NO: 1997 - protein, 13 aa, synthetic construct
GSGSPHSKAQSAH

SEQ ID NO: 1998 - protein, 13 aa, synthetic construct
GNGSPHSKSQNQH

SEQ ID NO: 1999 - protein, 13 aa, synthetic construct
GSGSPHSKSQNHQ

SEQ ID NO: 2000 - protein, 13 aa, synthetic construct
RSGSPHSKAQDQQ

SEQ ID NO: 2001 - protein, 13 aa, synthetic construct
GSGSPHSKAQSTM

SEQ ID NO: 2002 - protein, 13 aa, synthetic construct
GSGSPHSKAQREM

SEQ ID NO: 2003 - protein, 13 aa, synthetic construct
GGGSPHSKSQNRQ

SEQ ID NO: 2004 - protein, 13 aa, synthetic construct
GSGSPHSKAQYRA

SEQ ID NO: 2005 - protein, 13 aa, synthetic construct
GGGSPHSKAQRQQ

SEQ ID NO: 2006 - protein, 13 aa, synthetic construct
GSGSPHSKNQWQQ

SEQ ID NO: 2007 - protein, 13 aa, synthetic construct
GSGSPHSKAQRMN

SEQ ID NO: 2008 - protein, 13 aa, synthetic construct
GSGSPHAKAQNHQ

SEQ ID NO: 2009 - protein, 13 aa, synthetic construct
GSGSPHSKAGDSQ

SEQ ID NO: 2010 - protein, 13 aa, synthetic construct
GSGSPHSKLKSQQ

SEQ ID NO: 2011 - protein, 13 aa, synthetic construct
GSGSPHSKAQKIS

SEQ ID NO: 2012 - protein, 13 aa, synthetic construct
GSGSPHSKAPSMQ

SEQ ID NO: 2013 - protein, 13 aa, synthetic construct
GSGSPHSKASPRQ

SEQ ID NO: 2014 - protein, 13 aa, synthetic construct
GSGSPHSKRMEQQ

SEQ ID NO: 2015 - protein, 13 aa, synthetic construct
GSGSPHSKAQYQN

SEQ ID NO: 2016 - protein, 13 aa, synthetic construct
GSGSPHARMQNQQ

SEQ ID NO: 2017 - protein, 13 aa, synthetic construct
GSGSPHVKSQNQQ

SEQ ID NO: 2018 - protein, 13 aa, synthetic construct
GQDSPHKSGQNQQ

SEQ ID NO: 2019 - protein, 13 aa, synthetic construct
GSGSPHASRQNQQ

SEQ ID NO: 2020 - protein, 13 aa, synthetic construct
GSGSPHASRQNKQ

SEQ ID NO: 2021 - protein, 13 aa, synthetic construct
GSGSPHVKIQNQQ

SEQ ID NO: 2022 - protein, 13 aa, synthetic construct
GSGSPHSKAKNQQ

SEQ ID NO: 2023 - protein, 13 aa, synthetic construct
GSGSPHKKNQNQQ

SEQ ID NO: 2024 - protein, 13 aa, synthetic construct
GSGSPHVRMQNQQ

SEQ ID NO: 2025 - protein, 13 aa, synthetic construct
GSGSPHASRQKQQ

SEQ ID NO: 2026 - protein, 13 aa, synthetic construct
GHSSPHRSGQNQQ

SEQ ID NO: 2027 - protein, 13 aa, synthetic construct
GSGSPHTRGQNQQ

SEQ ID NO: 2028 - protein, 13 aa, synthetic construct
CSGSPHSKAQNQQ

SEQ ID NO: 2029 - protein, 13 aa, synthetic construct
GSGSPHRKAQNQQ

SEQ ID NO: 2030 - protein, 13 aa, synthetic construct
GSGSPHSKAQNKQ

SEQ ID NO: 2031 - protein, 13 aa, synthetic construct
GSGSPHSKAQTQQ

SEQ ID NO: 2032 - protein, 13 aa, synthetic construct
CSGSPHKTSQNQQ

SEQ ID NO: 2033 - protein, 13 aa, synthetic construct
CSHSPHKSGQNQQ

SEQ ID NO: 2034 - protein, 13 aa, synthetic construct
GQSSPHRSGQNQQ

SEQ ID NO: 2035 - protein, 13 aa, synthetic construct
GRGSPHASRQNQQ

SEQ ID NO: 2036 - protein, 13 aa, synthetic construct
GSGSPHASRKNQQ

SEQ ID NO: 2037 - protein, 13 aa, synthetic construct
GSGSPHASRQNQH

SEQ ID NO: 2038 - protein, 13 aa, synthetic construct
GSGSPHKFGKNQQ

SEQ ID NO: 2039 - protein, 13 aa, synthetic construct
GSGSPHKFGQKQQ

SEQ ID NO: 2040 - protein, 13 aa, synthetic construct
GSGSPHKFGQNQQ

SEQ ID NO: 2041 - protein, 13 aa, synthetic construct
GSGSPHKIGQNQQ

SEQ ID NO: 2042 - protein, 13 aa, synthetic construct
GSGSPHKLGQNQQ

SEQ ID NO: 2043 - protein, 13 aa, synthetic construct
GSGSPHKTSKNQQ

SEQ ID NO: 2044 - protein, 13 aa, synthetic construct
GSGSPHKTSQKQQ

SEQ ID NO: 2045 - protein, 13 aa, synthetic construct
GSGSPHKTSQNQQ

SEQ ID NO: 2046 - protein, 13 aa, synthetic construct
GSGSPHKTTQNQQ

SEQ ID NO: 2047 - protein, 13 aa, synthetic construct
GSGSPHKTYQNQQ

SEQ ID NO: 2048 - protein, 13 aa, synthetic construct
GSGSPHKYGQNQQ

SEQ ID NO: 2049 - protein, 13 aa, synthetic construct
GSGSPHSKAQHQQ

SEQ ID NO: 2050 - protein, 13 aa, synthetic construct
GSGSPHSKDQNQQ

SEQ ID NO: 2051 - protein, 13 aa, synthetic construct
GSGSPHSKPQNQQ

SEQ ID NO: 2052 - protein, 13 aa, synthetic construct
GSGSPHVRGQKQQ

SEQ ID NO: 2053 - protein, 13 aa, synthetic construct
GSGSPHVRGQNKQ

SEQ ID NO: 2054 - protein, 13 aa, synthetic construct
GSHSPHKRGQNQQ

SEQ ID NO: 2055 - protein, 13 aa, synthetic construct
GSHSPHKSGQKQQ

SEQ ID NO: 2056 - protein, 13 aa, synthetic construct
GSHSPHKSGQNQQ

SEQ ID NO: 2057 - protein, 13 aa, synthetic construct
VSGSPHASRQNQQ

SEQ ID NO: 2058 - protein, 13 aa, synthetic construct
VSGSPHGARQNQQ

SEQ ID NO: 2059 - protein, 13 aa, synthetic construct
VSGSPHKFGQNQQ

SEQ ID NO: 2060 - protein, 13 aa, synthetic construct
GSGSPHSKAQYYV

SEQ ID NO: 2061 - protein, 13 aa, synthetic construct
GSGSPHSKLRRQQ

SEQ ID NO: 2062 - protein, 13 aa, synthetic construct
GSGSPHSKAGCGQ

SEQ ID NO: 2063 - protein, 13 aa, synthetic construct
GSGSPHSRAQNQQ

SEQ ID NO: 2064 - protein, 13 aa, synthetic construct
GSGSPHSKRLRQQ

SEQ ID NO: 2065 - protein, 13 aa, synthetic construct
GSGSPHSLRRNQQ

SEQ ID NO: 2066 - protein, 13 aa, synthetic construct
GSGSPHSRGRNQQ

SEQ ID NO: 2067 - protein, 13 aa, synthetic construct
GSGSPHSSRRNQQ

SEQ ID NO: 2068 - protein, 13 aa, synthetic construct
GSGSPHSKAFRLQ

SEQ ID NO: 2069 - protein, 13 aa, synthetic construct
GSCSPHRKAQNQQ

SEQ ID NO: 2070 - protein, 13 aa, synthetic construct
GSGSPHFLRQNQQ

SEQ ID NO: 2071 - protein, 13 aa, synthetic construct
GSGSPHSLRFNQQ

SEQ ID NO: 2072 - protein, 13 aa, synthetic construct
GSGSPHSKWLLQQ

SEQ ID NO: 2073 - protein, 13 aa, synthetic construct
GSGSPHSKRRLQQ

SEQ ID NO: 2074 - protein, 13 aa, synthetic construct
GSGSPHSKAQRKL

SEQ ID NO: 2075 - protein, 13 aa, synthetic construct
GSGSPHSKALRRQ

SEQ ID NO: 2076 - protein, 13 aa, synthetic construct
GSGSPHSKAQRLR

SEQ ID NO: 2077 - protein, 13 aa, synthetic construct
GSGSPHSKAQRRL

SEQ ID NO: 2078 - protein, 13 aa, synthetic construct
GSGSPHSKARRQQ

SEQ ID NO: 2079 - protein, 13 aa, synthetic construct
GSGSPHSKARRLQ

SEQ ID NO: 2080 - protein, 13 aa, synthetic construct
GSGSPHSKSRRQQ

SEQ ID NO: 2081 - protein, 13 aa, synthetic construct
GLLSPHWKAQNQQ

SEQ ID NO: 2082 - protein, 13 aa, synthetic construct
GSGSPHSKARLRQ

SEQ ID NO: 2083 - protein, 13 aa, synthetic construct
GSGSPHSKASKRQ

SEQ ID NO: 2084 - protein, 13 aa, synthetic construct
GSGSPHVRRQNQQ

SEQ ID NO: 2085 - protein, 13 aa, synthetic construct
GSGSPHSKAQLYR

SEQ ID NO: 2086 - protein, 13 aa, synthetic construct
GSGSPHSKAQLTV

SEQ ID NO: 2087 - protein, 13 aa, synthetic construct
GHDSPHKRGQHRQ

SEQ ID NO: 2088 - protein, 13 aa, synthetic construct
GHDSPHKSGQKQQ

SEQ ID NO: 2089 - protein, 13 aa, synthetic construct
GHDSPHKSGLTQQ

SEQ ID NO: 2090 - protein, 13 aa, synthetic construct
GDDSPHKSGRNQQ

SEQ ID NO: 2091 - protein, 13 aa, synthetic construct
GHDSPHKSGLNQQ

SEQ ID NO: 2092 - protein, 13 aa, synthetic construct
GHESPHKSAQNHQ

SEQ ID NO: 2093 - protein, 13 aa, synthetic construct
GHDSPHKSAQNQW

SEQ ID NO: 2094 - protein, 13 aa, synthetic construct
GHDSPHKSGQNTH

SEQ ID NO: 2095 - protein, 13 aa, synthetic construct
GHDSPHKSGRRRQ

SEQ ID NO: 2096 - protein, 13 aa, synthetic construct
GHDSPHKSAQNQQ

SEQ ID NO: 2097 - protein, 13 aa, synthetic construct
GHDSPHKSGQYQQ

SEQ ID NO: 2098 - protein, 13 aa, synthetic construct
GNYSPHKIGQNQQ

SEQ ID NO: 2099 - protein, 13 aa, synthetic construct
GHDSPHKSRQNDQ

SEQ ID NO: 2100 - protein, 13 aa, synthetic construct
GHDSPHKSGQIRQ

SEQ ID NO: 2101 - protein, 13 aa, synthetic construct
GHDSPHKIGQNQH

SEQ ID NO: 2102 - protein, 13 aa, synthetic construct
GYDSPHKSGQKQQ

SEQ ID NO: 2103 - protein, 13 aa, synthetic construct
GHDSPHKSGQSVQ

SEQ ID NO: 2104 - protein, 13 aa, synthetic construct
GHESPHKSGRSQQ

SEQ ID NO: 2105 - protein, 13 aa, synthetic construct
GHDSPHKSGQNKL

SEQ ID NO: 2106 - protein, 13 aa, synthetic construct
GHDSPHKTGQNQQ

SEQ ID NO: 2107 - protein, 13 aa, synthetic construct
GRGSPHKRGQNQQ

SEQ ID NO: 2108 - protein, 13 aa, synthetic construct
GSGSPHTKAQNPP

SEQ ID NO: 2109 - protein, 13 aa, synthetic construct
GQDSPHKSGQHQQ

SEQ ID NO: 2110 - protein, 13 aa, synthetic construct
GHDSPHKSGQIQH

SEQ ID NO: 2111 - protein, 13 aa, synthetic construct
GHDSPHKSGPRQQ

SEQ ID NO: 2112 - protein, 13 aa, synthetic construct
GHDSPHKSGHTQQ

SEQ ID NO: 2113 - protein, 13 aa, synthetic construct
GHDSPHKSGQRQH

SEQ ID NO: 2114 - protein, 13 aa, synthetic construct
GSGSPHTKAQNQQ

SEQ ID NO: 2115 - protein, 13 aa, synthetic construct
GHDSPHKSAQSQQ

SEQ ID NO: 2116 - protein, 13 aa, synthetic construct
GHESPHKSGQNQQ

SEQ ID NO: 2117 - protein, 13 aa, synthetic construct
GHDSPHKSLQNQQ

SEQ ID NO: 2118 - protein, 13 aa, synthetic construct
GHGSPHSKAQNPQ

SEQ ID NO: 2119 - protein, 13 aa, synthetic construct
GHDSPHKSGRNQE

SEQ ID NO: 2120 - protein, 13 aa, synthetic construct
GHDSPHKSGQTQL

SEQ ID NO: 2121 - protein, 13 aa, synthetic construct
GHDSPHKSEKNQQ

SEQ ID NO: 2122 - protein, 13 aa, synthetic construct
GRDSPHKSGQDQQ

SEQ ID NO: 2123 - protein, 13 aa, synthetic construct
GHDSPHKTGHNQQ

SEQ ID NO: 2124 - protein, 13 aa, synthetic construct
GYDSPHKSGQTQQ

SEQ ID NO: 2125 - protein, 13 aa, synthetic construct
GHESPHKSGQTQQ

SEQ ID NO: 2126 - protein, 13 aa, synthetic construct
GHDSPHKSGQSKQ

SEQ ID NO: 2127 - protein, 13 aa, synthetic construct
GHDSPHKTGQNQP

SEQ ID NO: 2128 - protein, 13 aa, synthetic construct
GHDSPHKSGQSPQ

SEQ ID NO: 2129 - protein, 13 aa, synthetic construct
GNDSPHKSVQNQQ

SEQ ID NO: 2130 - protein, 13 aa, synthetic construct
GHDSPHKSAQNYQ

SEQ ID NO: 2131 - protein, 13 aa, synthetic construct
GSASPHSKALNQQ

SEQ ID NO: 2132 - protein, 13 aa, synthetic construct
GHESPHKSAQNRQ

SEQ ID NO: 2133 - protein, 13 aa, synthetic construct
GQDSPHKIGQNQQ

SEQ ID NO: 2134 - protein, 13 aa, synthetic construct
GHDSPHKSGQNHL

SEQ ID NO: 2135 - protein, 13 aa, synthetic construct
GHDSPHKSGQYQH

SEQ ID NO: 2136 - protein, 13 aa, synthetic construct
GNDSPHKSVQNHQ

SEQ ID NO: 2137 - protein, 13 aa, synthetic construct
GHDSPHKSGQNQW

SEQ ID NO: 2138 - protein, 13 aa, synthetic construct
GHDSPHKSVQNQH

SEQ ID NO: 2139 - protein, 13 aa, synthetic construct
GHDSPHKSGQNQH

SEQ ID NO: 2140 - protein, 13 aa, synthetic construct
GHDSPHKSGQTRQ

SEQ ID NO: 2141 - protein, 13 aa, synthetic construct
GHDSPHKSGQNLH

SEQ ID NO: 2142 - protein, 13 aa, synthetic construct
GHDSPHKSAQNQE

SEQ ID NO: 2143 - protein, 13 aa, synthetic construct
GHDSPHKSGQHLQ

SEQ ID NO: 2144 - protein, 13 aa, synthetic construct
GHDSPHKSRLNQP

SEQ ID NO: 2145 - protein, 13 aa, synthetic construct
GQDSPHKSGQNQD

SEQ ID NO: 2146 - protein, 13 aa, synthetic construct
GHDSPHKSGRNQQ

SEQ ID NO: 2147 - protein, 13 aa, synthetic construct
GHDSPHKSGQNLL

SEQ ID NO: 2148 - protein, 13 aa, synthetic construct
GHDSPHKSGQLVI

SEQ ID NO: 2149 - protein, 13 aa, synthetic construct
GHDSPHKSRQSQQ

SEQ ID NO: 2150 - protein, 13 aa, synthetic construct
GHDSPHKSGRTQE

SEQ ID NO: 2151 - protein, 13 aa, synthetic construct
GHDSPHKSVQTHQ

SEQ ID NO: 2152 - protein, 13 aa, synthetic construct
GHDSPHKSGQNQP

SEQ ID NO: 2153 - protein, 13 aa, synthetic construct
GHDSPHKSGQTQQ

SEQ ID NO: 2154 - protein, 13 aa, synthetic construct
GPDSPHKIGQNQQ

SEQ ID NO: 2155 - protein, 13 aa, synthetic construct
GHDSPHKSVQNQQ

SEQ ID NO: 2156 - protein, 13 aa, synthetic construct
GHDSPHKSRQDQH

SEQ ID NO: 2157 - protein, 13 aa, synthetic construct
GPDSPHKSGQKQQ

SEQ ID NO: 2158 - protein, 13 aa, synthetic construct
GHDSPHKSRQSQH

SEQ ID NO: 2159 - protein, 13 aa, synthetic construct
GHDSPHKSVQNQL

SEQ ID NO: 2160 - protein, 13 aa, synthetic construct
GYDSPHKSGQYQH

SEQ ID NO: 2161 - protein, 13 aa, synthetic construct
GHDSPHKSRQNQQ

SEQ ID NO: 2162 - protein, 13 aa, synthetic construct
GHDSPHKSWVRQQ

SEQ ID NO: 2163 - protein, 13 aa, synthetic construct
GHESPHKSGQNQH

SEQ ID NO: 2164 - protein, 13 aa, synthetic construct
GHDSPHKIGHNQQ

SEQ ID NO: 2165 - protein, 13 aa, synthetic construct
GHDSPHKSNAWQQ

SEQ ID NO: 2166 - protein, 13 aa, synthetic construct
GHDSPHKSGQSVP

SEQ ID NO: 2167 - protein, 13 aa, synthetic construct
GHESPHKSGQNIQ

SEQ ID NO: 2168 - protein, 13 aa, synthetic construct
GHDSPHKSVQNHL

SEQ ID NO: 2169 - protein, 13 aa, synthetic construct
GHDSPHKIGLDQQ

SEQ ID NO: 2170 - protein, 13 aa, synthetic construct
ASGSPHSKAQHQQ

SEQ ID NO: 2171 - protein, 13 aa, synthetic construct
GHDSPHKRGPDQQ

SEQ ID NO: 2172 - protein, 13 aa, synthetic construct
GMGSPHSKTQNQQ

SEQ ID NO: 2173 - protein, 13 aa, synthetic construct
GHDSPHKSGESQQ

SEQ ID NO: 2174 - protein, 13 aa, synthetic construct
GHDSPHKHGQNHQ

SEQ ID NO: 2175 - protein, 13 aa, synthetic construct
GTGSPHSKAQNQL

SEQ ID NO: 2176 - protein, 13 aa, synthetic construct
GHDSPHKSVQNKQ

SEQ ID NO: 2177 - protein, 13 aa, synthetic construct
GQVSPHKSGQNQQ

SEQ ID NO: 2178 - protein, 13 aa, synthetic construct
GHDSPHKSGQRQL

SEQ ID NO: 2179 - protein, 13 aa, synthetic construct
GHDSPHKIGQNQL

SEQ ID NO: 2180 - protein, 13 aa, synthetic construct
GHDSPHKSGQIIV

SEQ ID NO: 2181 - protein, 13 aa, synthetic construct
GYDSPHKSGQKQS

SEQ ID NO: 2182 - protein, 13 aa, synthetic construct
GNGSPHSKAQNQE

SEQ ID NO: 2183 - protein, 13 aa, synthetic construct
GDDSPHKSVQNQQ

SEQ ID NO: 2184 - protein, 13 aa, synthetic construct
GHDSPHKSVQSHQ

SEQ ID NO: 2185 - protein, 13 aa, synthetic construct
GHDSPHKSGQFVV

SEQ ID NO: 2186 - protein, 13 aa, synthetic construct
GHDSPHKSRQNLQ

SEQ ID NO: 2187 - protein, 13 aa, synthetic construct
GHNSPHKSGQNQE

SEQ ID NO: 2188 - protein, 13 aa, synthetic construct
GHDSPHKSGQSQP

SEQ ID NO: 2189 - protein, 13 aa, synthetic construct
GHESPHKSGQNEQ

SEQ ID NO: 2190 - protein, 13 aa, synthetic construct
GHDSPHKSGQNQL

SEQ ID NO: 2191 - protein, 13 aa, synthetic construct
GHDSPHKSAQNLL

SEQ ID NO: 2192 - protein, 13 aa, synthetic construct
ASGSPHSKAINQQ

SEQ ID NO: 2193 - protein, 13 aa, synthetic construct
GNGSPHKRGQNQQ

SEQ ID NO: 2194 - protein, 13 aa, synthetic construct
GHDSPHKSGQSLQ

SEQ ID NO: 2195 - protein, 13 aa, synthetic construct
GHDSPHKSAQNHQ

SEQ ID NO: 2196 - protein, 13 aa, synthetic construct
GHDSPHKSGRNRQ

SEQ ID NO: 2197 - protein, 13 aa, synthetic construct
GHDSPHKYGQNEQ

SEQ ID NO: 2198 - protein, 13 aa, synthetic construct
GNGSPHSKAPNLQ

SEQ ID NO: 2199 - protein, 13 aa, synthetic construct
GHDSPHKSQQNQQ

SEQ ID NO: 2200 - protein, 13 aa, synthetic construct
GHDSPHKSVQSKQ

SEQ ID NO: 2201 - protein, 13 aa, synthetic construct
GNDSPHKIGHNQQ

SEQ ID NO: 2202 - protein, 13 aa, synthetic construct
GGGSPHSKAQDQQ

SEQ ID NO: 2203 - protein, 13 aa, synthetic construct
GQDSPHKSGQNPL

SEQ ID NO: 2204 - protein, 13 aa, synthetic construct
ASGSPHSKAQNHQ

SEQ ID NO: 2205 - protein, 13 aa, synthetic construct
GHDSPHKSGRDQK

SEQ ID NO: 2206 - protein, 13 aa, synthetic construct
GHDSPHKSVHNQQ

SEQ ID NO: 2207 - protein, 13 aa, synthetic construct
GHDSPHKSGQWKR

SEQ ID NO: 2208 - protein, 13 aa, synthetic construct
GSGSPHSKAENRQ

SEQ ID NO: 2209 - protein, 13 aa, synthetic construct
GHDSPHKSGQSQQ

SEQ ID NO: 2210 - protein, 13 aa, synthetic construct
GHDSPHKSRQAQQ

SEQ ID NO: 2211 - protein, 13 aa, synthetic construct
GHDSPHKSVQNHQ

SEQ ID NO: 2212 - protein, 13 aa, synthetic construct
GHDSPHKSKQNQQ

SEQ ID NO: 2213 - protein, 13 aa, synthetic construct
GHDSPHKSAQNQL

SEQ ID NO: 2214 - protein, 13 aa, synthetic construct
GHDSPHKSGQTQP

SEQ ID NO: 2215 - protein, 13 aa, synthetic construct
GHDSPHKLWINQQ

SEQ ID NO: 2216 - protein, 13 aa, synthetic construct
GPDSPHKSGQNQQ

SEQ ID NO: 2217 - protein, 13 aa, synthetic construct
GHDSPHKSVQKQL

SEQ ID NO: 2218 - protein, 13 aa, synthetic construct
GHPSPHWKGQNQQ

SEQ ID NO: 2219 - protein, 13 aa, synthetic construct
GHDSPHKSGRNQL

SEQ ID NO: 2220 - protein, 13 aa, synthetic construct
GSGSPHSKVQDQQ

SEQ ID NO: 2221 - protein, 13 aa, synthetic construct
GHDSPHKMGRNQQ

SEQ ID NO: 2222 - protein, 13 aa, synthetic construct
GHDSPHKSGISIQ

SEQ ID NO: 2223 - protein, 13 aa, synthetic construct
GHDSPHKSVQNLQ

SEQ ID NO: 2224 - protein, 13 aa, synthetic construct
GHDSPHKMAHNQQ

SEQ ID NO: 2225 - protein, 13 aa, synthetic construct
GHDSPHKHGQNQQ

SEQ ID NO: 2226 - protein, 13 aa, synthetic construct
GHDSPHKSVQSQQ

SEQ ID NO: 2227 - protein, 13 aa, synthetic construct
GHDSPHKSGQTVC

SEQ ID NO: 2228 - protein, 13 aa, synthetic construct
GQDSPHKSGQYQQ

SEQ ID NO: 2229 - protein, 13 aa, synthetic construct
GHDSPHKSGQQIM

SEQ ID NO: 2230 - protein, 13 aa, synthetic construct
GHDSPHKSRQNEQ

SEQ ID NO: 2231 - protein, 13 aa, synthetic construct
GHDSPHKSGLNHQ

SEQ ID NO: 2232 - protein, 13 aa, synthetic construct
GYDSPHKSGQNQQ

SEQ ID NO: 2233 - protein, 13 aa, synthetic construct
GHDSPHKSGQNLQ

SEQ ID NO: 2234 - protein, 13 aa, synthetic construct
GHDSPHKSRQDQQ

SEQ ID NO: 2235 - protein, 13 aa, synthetic construct
GDDSPHKSGQKQL

SEQ ID NO: 2236 - protein, 13 aa, synthetic construct
GSGSPHSKAQNQA

SEQ ID NO: 2237 - protein, 13 aa, synthetic construct
GDDSPHKSGHNQQ

SEQ ID NO: 2238 - protein, 13 aa, synthetic construct
GHDSPHKSGQMIH

SEQ ID NO: 2239 - protein, 13 aa, synthetic construct
GHDSPHKSGRNHQ

SEQ ID NO: 2240 - protein, 13 aa, synthetic construct
GHDSPHKSVQNRQ

SEQ ID NO: 2241 - protein, 13 aa, synthetic construct
GHDSPHKSGQKMN

SEQ ID NO: 2242 - protein, 16 aa, synthetic construct
TINGSGSPHSKAQNQQ

SEQ ID NO: 2243 - protein, 16 aa, synthetic construct
TINGHDSPHKSGQNQQ

SEQ ID NO: 2244 - protein, 16 aa, synthetic construct
TIIGSGSPHSKAQNRH

SEQ ID NO: 2245 - protein, 16 aa, synthetic construct
TFPGSGSPHSKVQNQQ

SEQ ID NO: 2246 - protein, 16 aa, synthetic construct
TEKMSGSPHSKAQNQQ

SEQ ID NO: 2247 - protein, 16 aa, synthetic construct
EINGRGSPHSKAQNQQ

SEQ ID NO: 2248 - protein, 16 aa, synthetic construct
TVNRNGSPHSKAQNQQ

SEQ ID NO: 2249 - protein, 16 aa, synthetic construct
TVNGSGSPHSKARDQQ

SEQ ID NO: 2250 - protein, 16 aa, synthetic construct
TFNGSGSPHSKAPNLQ

SEQ ID NO: 2251 - protein, 16 aa, synthetic construct
TEKTSGSPHSKAQNQQ

SEQ ID NO: 2252 - protein, 16 aa, synthetic construct
TINGSGSPHSKAHVRQ

SEQ ID NO: 2253 - protein, 16 aa, synthetic construct
TVNGSGSPHSKAPNQH

SEQ ID NO: 2254 - protein, 16 aa, synthetic construct
TEKISGSPHSKAQNQQ

SEQ ID NO: 2255 - protein, 16 aa, synthetic construct
TINGPGSPHSKAHNQQ

SEQ ID NO: 2256 - protein, 16 aa, synthetic construct
TVNGSGSPHSKTQSQQ

SEQ ID NO: 2257 - protein, 16 aa, synthetic construct
SINESGSPHSKAQNQQ

SEQ ID NO: 2258 - protein, 16 aa, synthetic construct
TERTSGSPHSKAQNQQ

SEQ ID NO: 2259 - protein, 16 aa, synthetic construct
TINGSGSPHSKAQPAK

SEQ ID NO: 2260 - protein, 16 aa, synthetic construct
TEKSSGSPHSKAQNQQ

SEQ ID NO: 2261 - protein, 16 aa, synthetic construct
TSYGNGSPHSKAQNQQ

SEQ ID NO: 2262 - protein, 16 aa, synthetic construct
TEKGSGSPHSKAQNQQ

SEQ ID NO: 2263 - protein, 16 aa, synthetic construct
TINGSGSPHSKSQTQQ

SEQ ID NO: 2264 - protein, 16 aa, synthetic construct
TERISGSPHSKAQNQQ

SEQ ID NO: 2265 - protein, 16 aa, synthetic construct
TERASGSPHSKAQNQQ

SEQ ID NO: 2266 - protein, 16 aa, synthetic construct
ELHGSGSPHSKAQNQQ

SEQ ID NO: 2267 - protein, 16 aa, synthetic construct
AINGSGSPHSKAQNLA

SEQ ID NO: 2268 - protein, 16 aa, synthetic construct
TVNGSGSPHSKSQNQL

SEQ ID NO: 2269 - protein, 16 aa, synthetic construct
TERNSGSPHSKAQNQQ

SEQ ID NO: 2270 - protein, 16 aa, synthetic construct
SVNGNGSPHSKAQNQQ

SEQ ID NO: 2271 - protein, 16 aa, synthetic construct
TFNGSGSPHSKAQGQQ

SEQ ID NO: 2272 - protein, 16 aa, synthetic construct
TERVSGSPHSKAQNQQ

SEQ ID NO: 2273 - protein, 16 aa, synthetic construct
TINGSGSPHSKALNRQ

SEQ ID NO: 2274 - protein, 16 aa, synthetic construct
TERLSGSPHSKAQNQQ

SEQ ID NO: 2275 - protein, 16 aa, synthetic construct
TDNGSGSPHSKAHNQQ

SEQ ID NO: 2276 - protein, 16 aa, synthetic construct
TFHGSGSPHSKTQNQQ

SEQ ID NO: 2277 - protein, 16 aa, synthetic construct
TINGGGSPHSKAQTQQ

SEQ ID NO: 2278 - protein, 16 aa, synthetic construct
TSNGSGSPHSKAQNPP

SEQ ID NO: 2279 - protein, 16 aa, synthetic construct
TINGSGSPHSKAQNLQ

SEQ ID NO: 2280 - protein, 16 aa, synthetic construct
TVHGNGSPHSKAQNQQ

SEQ ID NO: 2281 - protein, 16 aa, synthetic construct
TINGGGSPHSKAQNQQ

SEQ ID NO: 2282 - protein, 16 aa, synthetic construct
TENMSGSPHSKAQNQQ

SEQ ID NO: 2283 - protein, 16 aa, synthetic construct
TENVSGSPHSKAQNQQ

SEQ ID NO: 2284 - protein, 16 aa, synthetic construct
TSSGSGSPHSKAQYQQ

SEQ ID NO: 2285 - protein, 16 aa, synthetic construct
TIDGGGSPHSKAQNKQ

SEQ ID NO: 2286 - protein, 16 aa, synthetic construct
TEKVSGSPHSKAQNQQ

SEQ ID NO: 2287 - protein, 16 aa, synthetic construct
AINGSGSPHSKAQDQE

SEQ ID NO: 2288 - protein, 16 aa, synthetic construct
TCNKSGSPHSKAQNQQ

SEQ ID NO: 2289 - protein, 16 aa, synthetic construct
TINGGGSPHSKAQNQL

SEQ ID NO: 2290 - protein, 16 aa, synthetic construct
NINGGGSPHSKAQNQQ

SEQ ID NO: 2291 - protein, 16 aa, synthetic construct
TEHLSGSPHSKAQNQQ

SEQ ID NO: 2292 - protein, 16 aa, synthetic construct
AEMGSGSPHSKAQNQQ

SEQ ID NO: 2293 - protein, 16 aa, synthetic construct
ATNGSGSPHSKAQNHQ

SEQ ID NO: 2294 - protein, 16 aa, synthetic construct
AIKGSGSPHSKAQDQQ

SEQ ID NO: 2295 - protein, 16 aa, synthetic construct
TINGGGSPHSKSQNQL

SEQ ID NO: 2296 - protein, 16 aa, synthetic construct
TVNGNGSPHSKAQNKQ

SEQ ID NO: 2297 - protein, 16 aa, synthetic construct
TINGSGSPHSKGHWQQ

SEQ ID NO: 2298 - protein, 16 aa, synthetic construct
TDKTSGSPHSKAQNQQ

SEQ ID NO: 2299 - protein, 16 aa, synthetic construct
TFKGSGSPHSKAPNQQ

SEQ ID NO: 2300 - protein, 16 aa, synthetic construct
TVNGSGSPHSKAQNQL

SEQ ID NO: 2301 - protein, 16 aa, synthetic construct
TINGSGSPHSKRPEQQ

SEQ ID NO: 2302 - protein, 16 aa, synthetic construct
TINGSGSPHSKAQRTM

SEQ ID NO: 2303 - protein, 16 aa, synthetic construct
TEKASGSPHSKAQNQQ

SEQ ID NO: 2304 - protein, 16 aa, synthetic construct
SDQGSGSPHSKAQNQQ

SEQ ID NO: 2305 - protein, 16 aa, synthetic construct
TEITSGSPHSKAQNQQ

SEQ ID NO: 2306 - protein, 16 aa, synthetic construct
TDKSSGSPHSKAQNQQ

SEQ ID NO: 2307 - protein, 16 aa, synthetic construct
TIDGSGSPHSKAQNQQ

SEQ ID NO: 2308 - protein, 16 aa, synthetic construct
TVNGNGSPHSKAQNQH

SEQ ID NO: 2309 - protein, 16 aa, synthetic construct
NTNGSGSPHSKAQNQQ

SEQ ID NO: 2310 - protein, 16 aa, synthetic construct
TETHSGSPHSKAQNQQ

SEQ ID NO: 2311 - protein, 16 aa, synthetic construct
TINGGGSPHSKALNQQ

SEQ ID NO: 2312 - protein, 16 aa, synthetic construct
TINGSGSPHSKALHQH

SEQ ID NO: 2313 - protein, 16 aa, synthetic construct
TINGTGSPHSKAQNHQ

SEQ ID NO: 2314 - protein, 16 aa, synthetic construct
TINGSGSPHSKAQHRI

SEQ ID NO: 2315 - protein, 16 aa, synthetic construct
TINGSGSPHSKAQYIH

SEQ ID NO: 2316 - protein, 16 aa, synthetic construct
TENISGSPHSKAQNQQ

SEQ ID NO: 2317 - protein, 16 aa, synthetic construct
TIIGGGSPHSKAHNQQ

SEQ ID NO: 2318 - protein, 16 aa, synthetic construct
TINGSGSPHSKAQKFE

SEQ ID NO: 2319 - protein, 16 aa, synthetic construct
TSNESGSPHSKAQNHQ

SEQ ID NO: 2320 - protein, 16 aa, synthetic construct
TINGSGSPHSKAQFPS

SEQ ID NO: 2321 - protein, 16 aa, synthetic construct
TERPSGSPHSKAQNQQ

SEQ ID NO: 2322 - protein, 16 aa, synthetic construct
TINGNGSPHSKAQNPL

SEQ ID NO: 2323 - protein, 16 aa, synthetic construct
SIKGNGSPHSKAQNQQ

SEQ ID NO: 2324 - protein, 16 aa, synthetic construct
TERMSGSPHSKAQNQQ

SEQ ID NO: 2325 - protein, 16 aa, synthetic construct
TERSSGSPHSKAQNQQ

SEQ ID NO: 2326 - protein, 16 aa, synthetic construct
TELHSGSPHSKAQNQQ

SEQ ID NO: 2327 - protein, 16 aa, synthetic construct
TELTSGSPHSKAQNQQ

SEQ ID NO: 2328 - protein, 16 aa, synthetic construct
TINGSGSPHSKAHNQQ

SEQ ID NO: 2329 - protein, 16 aa, synthetic construct
TINGGGSPHSKAQSQQ

SEQ ID NO: 2330 - protein, 16 aa, synthetic construct
TINGSGSPHSKAQAIK

SEQ ID NO: 2331 - protein, 16 aa, synthetic construct
TENTSGSPHSKAQNQQ

SEQ ID NO: 2332 - protein, 16 aa, synthetic construct
TIDGSGSPHSKGQNRQ

SEQ ID NO: 2333 - protein, 16 aa, synthetic construct
NINGSGSPHSKAQSQQ

SEQ ID NO: 2334 - protein, 16 aa, synthetic construct
TINGSVSPHGKAQNQL

SEQ ID NO: 2335 - protein, 16 aa, synthetic construct
TSNASGSPHSKAQNQL

SEQ ID NO: 2336 - protein, 16 aa, synthetic construct
TEARSGSPHSKAQNQQ

SEQ ID NO: 2337 - protein, 16 aa, synthetic construct
TEKNSGSPHSKAQNQQ

SEQ ID NO: 2338 - protein, 16 aa, synthetic construct
TANGSGSPHSKAQYQQ

SEQ ID NO: 2339 - protein, 16 aa, synthetic construct
TVNGSGSPHSKAQYQH

SEQ ID NO: 2340 - protein, 16 aa, synthetic construct
TINGSGSPHTKAQNPQ

SEQ ID NO: 2341 - protein, 16 aa, synthetic construct
TINGSGSPHSKGQNPP

SEQ ID NO: 2342 - protein, 16 aa, synthetic construct
TIIGSGSPHSKAQHQL

SEQ ID NO: 2343 - protein, 16 aa, synthetic construct
TINGSGSPHSKAQSPP

SEQ ID NO: 2344 - protein, 16 aa, synthetic construct
TIYGSGSPHSKAQNQQ

SEQ ID NO: 2345 - protein, 16 aa, synthetic construct
TINGSGSPHSKAQAKL

SEQ ID NO: 2346 - protein, 16 aa, synthetic construct
TDKNSGSPHSKAQNQQ

SEQ ID NO: 2347 - protein, 16 aa, synthetic construct
TINGSGSPHSKTKSQQ

SEQ ID NO: 2348 - protein, 16 aa, synthetic construct
TINGSGSPHSKAQDRP

SEQ ID NO: 2349 - protein, 16 aa, synthetic construct
TINGIGSPHSKAQNLG

SEQ ID NO: 2350 - protein, 16 aa, synthetic construct
TINGSGSPHSKAQSQQ

SEQ ID NO: 2351 - protein, 16 aa, synthetic construct
TENLSGSPHSKAQNQQ

SEQ ID NO: 2352 - protein, 16 aa, synthetic construct
TINGSGSPHSKAQAFH

SEQ ID NO: 2353 - protein, 16 aa, synthetic construct
TINGSGSPHSKAQKQQ

SEQ ID NO: 2354 - protein, 16 aa, synthetic construct
TFSGSGSPHSKAQNLQ

SEQ ID NO: 2355 - protein, 16 aa, synthetic construct
AINGSGSPHSKAQNAQ

SEQ ID NO: 2356 - protein, 16 aa, synthetic construct
TESWSGSPHSKAQNQQ

SEQ ID NO: 2357 - protein, 16 aa, synthetic construct
TTNGSGSPHSKAHNQL

SEQ ID NO: 2358 - protein, 16 aa, synthetic construct
TVNGNGSPHSKAQNHQ

SEQ ID NO: 2359 - protein, 16 aa, synthetic construct
TEDKSGSPHSKAQNQQ

SEQ ID NO: 2360 - protein, 16 aa, synthetic construct
TESASGSPHSKAQNQQ

SEQ ID NO: 2361 - protein, 16 aa, synthetic construct
TNNGSGSPHSKAQNQQ

SEQ ID NO: 2362 - protein, 16 aa, synthetic construct
TSNGGGSPHSKAQNLQ

SEQ ID NO: 2363 - protein, 16 aa, synthetic construct
TDKMSGSPHSKAQNQQ

SEQ ID NO: 2364 - protein, 16 aa, synthetic construct
EVHGSGSPHSKAQNQQ

SEQ ID NO: 2365 - protein, 16 aa, synthetic construct
TINGSGSPHSKAQKLN

SEQ ID NO: 2366 - protein, 16 aa, synthetic construct
TINGGGSPHSKSQNQH

SEQ ID NO: 2367 - protein, 16 aa, synthetic construct
TVNGGGSPHSKAQSQQ

SEQ ID NO: 2368 - protein, 16 aa, synthetic construct
TTNGSGSPHSKAQYQH

SEQ ID NO: 2369 - protein, 16 aa, synthetic construct
TISGSGSPHSKAQYQH

SEQ ID NO: 2370 - protein, 16 aa, synthetic construct
TESTSGSPHSKAQNQQ

SEQ ID NO: 2371 - protein, 16 aa, synthetic construct
TINGSGSPHSKSQNVQ

SEQ ID NO: 2372 - protein, 16 aa, synthetic construct
SINGSGSPHSKAQAQQ

SEQ ID NO: 2373 - protein, 16 aa, synthetic construct
TVNGSGSPHSKAQNLQ

SEQ ID NO: 2374 - protein, 16 aa, synthetic construct
TVRDSGSPHSKAQNQQ

SEQ ID NO: 2375 - protein, 16 aa, synthetic construct
TFNASGSPHSKAPNQQ

SEQ ID NO: 2376 - protein, 16 aa, synthetic construct
TDRMSGSPHSKAQNQQ

SEQ ID NO: 2377 - protein, 16 aa, synthetic construct
TINGSGSPHSKAQTPP

SEQ ID NO: 2378 - protein, 16 aa, synthetic construct
TIKGSGSPHSKAQNQQ

SEQ ID NO: 2379 - protein, 16 aa, synthetic construct
NHIGSGSPHSKAQNQQ

SEQ ID NO: 2380 - protein, 16 aa, synthetic construct
TINGSGSPHSKAQYQH

SEQ ID NO: 2381 - protein, 16 aa, synthetic construct
TIPIDGSPHSKAQNQQ

SEQ ID NO: 2382 - protein, 16 aa, synthetic construct
TINGSGSPHSKAQGQQ

SEQ ID NO: 2383 - protein, 16 aa, synthetic construct
TFNGSGSPHNKAQNHQ

SEQ ID NO: 2384 - protein, 16 aa, synthetic construct
ESDGSGSPHSKAQNQQ

SEQ ID NO: 2385 - protein, 16 aa, synthetic construct
TINGSGSPHSKAQPPA

SEQ ID NO: 2386 - protein, 16 aa, synthetic construct
TINGSGSPHSKAQERP

SEQ ID NO: 2387 - protein, 16 aa, synthetic construct
TIKGSGSPHSKAQDLQ

SEQ ID NO: 2388 - protein, 16 aa, synthetic construct
TDLKSGSPHSKAQNQQ

SEQ ID NO: 2389 - protein, 16 aa, synthetic construct
TINGGGSPHSKAQNPP

SEQ ID NO: 2390 - protein, 16 aa, synthetic construct
TINGSGSPHSKAQAMH

SEQ ID NO: 2391 - protein, 16 aa, synthetic construct
TVPNSGSPHSKAQNQQ

SEQ ID NO: 2392 - protein, 16 aa, synthetic construct
TVIGSGSPHSKALNQQ

SEQ ID NO: 2393 - protein, 16 aa, synthetic construct
TINGSGSPHSKAQHPS

SEQ ID NO: 2394 - protein, 16 aa, synthetic construct
TINGLGSPHSKSQNQQ

SEQ ID NO: 2395 - protein, 16 aa, synthetic construct
TINGTGSPHSKAQNQQ

SEQ ID NO: 2396 - protein, 16 aa, synthetic construct
TINGSGSPHSKAPGLQ

SEQ ID NO: 2397 - protein, 16 aa, synthetic construct
TINGSGSPHSKAQGIR

SEQ ID NO: 2398 - protein, 16 aa, synthetic construct
TESHSGSPHSKAQNQQ

SEQ ID NO: 2399 - protein, 16 aa, synthetic construct
TINGSGSPHSKAQAPA

SEQ ID NO: 2400 - protein, 16 aa, synthetic construct
TINGSGSPHSKSQSQQ

SEQ ID NO: 2401 - protein, 16 aa, synthetic construct
AEHGSGSPHSKAQNQQ

SEQ ID NO: 2402 - protein, 16 aa, synthetic construct
TEDRSGSPHSKAQNQQ

SEQ ID NO: 2403 - protein, 16 aa, synthetic construct
NCLGSGSPHSKAQNQQ

SEQ ID NO: 2404 - protein, 16 aa, synthetic construct
TDRGSGSPHSKAQNQQ

SEQ ID NO: 2405 - protein, 16 aa, synthetic construct
TINGSGSPHSKAQIPP

SEQ ID NO: 2406 - protein, 16 aa, synthetic construct
TVKGSGSPHSKAQDQQ

SEQ ID NO: 2407 - protein, 16 aa, synthetic construct
NADGSGSPHSKAQNQQ

SEQ ID NO: 2408 - protein, 16 aa, synthetic construct
TDKVSGSPHSKAQNQQ

SEQ ID NO: 2409 - protein, 16 aa, synthetic construct
TITGSGSPHSKAQTQL

SEQ ID NO: 2410 - protein, 16 aa, synthetic construct
TINGSGSPHSKAQAPS

SEQ ID NO: 2411 - protein, 16 aa, synthetic construct
NCVGSGSPHSKAQNQQ

SEQ ID NO: 2412 - protein, 16 aa, synthetic construct
TIRDAGSPHSKAQNQQ

SEQ ID NO: 2413 - protein, 16 aa, synthetic construct
TVKDSGSPHSKAQNQQ

SEQ ID NO: 2414 - protein, 16 aa, synthetic construct
NALGSGSPHSKAQNQQ

SEQ ID NO: 2415 - protein, 16 aa, synthetic construct
VINGSGSPHSKGQNQQ

SEQ ID NO: 2416 - protein, 16 aa, synthetic construct
TVNGGGSPHSKAQNQQ

SEQ ID NO: 2417 - protein, 16 aa, synthetic construct
TIQDGGSPHSKAQNQQ

SEQ ID NO: 2418 - protein, 16 aa, synthetic construct
TISGGGSPHSKAQNQQ

SEQ ID NO: 2419 - protein, 16 aa, synthetic construct
TSNASGSPHSKAHNQQ

SEQ ID NO: 2420 - protein, 16 aa, synthetic construct
TINGSGSPHSKAQNTY

SEQ ID NO: 2421 - protein, 16 aa, synthetic construct
TINGSGSPHSKSQNQH

SEQ ID NO: 2422 - protein, 16 aa, synthetic construct
TINGGGSPHSKAQDKQ

SEQ ID NO: 2423 - protein, 16 aa, synthetic construct
TEFVSGSPHSKAQNQQ

SEQ ID NO: 2424 - protein, 16 aa, synthetic construct
TVNGSGSPHSKAQNHL

SEQ ID NO: 2425 - protein, 16 aa, synthetic construct
TREISGSPHSKAQNQQ

SEQ ID NO: 2426 - protein, 16 aa, synthetic construct
TINGSGSPHSKAQIGM

SEQ ID NO: 2427 - protein, 16 aa, synthetic construct
TIDGSGSPHSKALNKQ

SEQ ID NO: 2428 - protein, 16 aa, synthetic construct
TIIGGGSPHSKAQNPQ

SEQ ID NO: 2429 - protein, 16 aa, synthetic construct
QGEGSGSPHSKAQNQQ

SEQ ID NO: 2430 - protein, 16 aa, synthetic construct
TINGTGSPHSKAPNQL

SEQ ID NO: 2431 - protein, 16 aa, synthetic construct
TVNGSGSPHSKAQLQQ

SEQ ID NO: 2432 - protein, 16 aa, synthetic construct
TFNGGGSPHSKAQYQQ

SEQ ID NO: 2433 - protein, 16 aa, synthetic construct
SINGSGSPHSKTQSQQ

SEQ ID NO: 2434 - protein, 16 aa, synthetic construct
TVNGGGSPHSKAQHQQ

SEQ ID NO: 2435 - protein, 16 aa, synthetic construct
SEKGSGSPHSKAQNQQ

SEQ ID NO: 2436 - protein, 16 aa, synthetic construct
NVNGSGSPHSKAQNQQ

SEQ ID NO: 2437 - protein, 16 aa, synthetic construct
GGEGSGSPHSKAQNQQ

SEQ ID NO: 2438 - protein, 16 aa, synthetic construct
TINGSGSPHSKAQRMS

SEQ ID NO: 2439 - protein, 16 aa, synthetic construct
TINGSGSPHSKAQGIL

SEQ ID NO: 2440 - protein, 16 aa, synthetic construct
EFVGSGSPHSKAQNQQ

SEQ ID NO: 2441 - protein, 16 aa, synthetic construct
TIIGSGSPHSKAQDRQ

SEQ ID NO: 2442 - protein, 16 aa, synthetic construct
SDKGSGSPHSKAQNQQ

SEQ ID NO: 2443 - protein, 16 aa, synthetic construct
TEQVSGSPHSKAQNQQ

SEQ ID NO: 2444 - protein, 16 aa, synthetic construct
TEHVSGSPHSKAQNQQ

SEQ ID NO: 2445 - protein, 16 aa, synthetic construct
TINGSGSPHSKARDWQ

SEQ ID NO: 2446 - protein, 16 aa, synthetic construct
TENASGSPHSKAQNQQ

SEQ ID NO: 2447 - protein, 16 aa, synthetic construct
EVQGSGSPHSKAQNQQ

SEQ ID NO: 2448 - protein, 16 aa, synthetic construct
TINGSGSPHSKAQNTH

SEQ ID NO: 2449 - protein, 16 aa, synthetic construct
TINGSGSPHSKAPNLQ

SEQ ID NO: 2450 - protein, 16 aa, synthetic construct
TINGSGSPHSKAQERS

SEQ ID NO: 2451 - protein, 16 aa, synthetic construct
TSNGSGSPHSKAQNYQ

SEQ ID NO: 2452 - protein, 16 aa, synthetic construct
TEYISGSPHSKAQNQQ

SEQ ID NO: 2453 - protein, 16 aa, synthetic construct
TINGSGSPHSKAQRTC

SEQ ID NO: 2454 - protein, 16 aa, synthetic construct
TINGSGSPHSKAQIGH

SEQ ID NO: 2455 - protein, 16 aa, synthetic construct
NCWGSGSPHSKAQNQQ

SEQ ID NO: 2456 - protein, 16 aa, synthetic construct
TINGSGSPHSKAQGAI

SEQ ID NO: 2457 - protein, 16 aa, synthetic construct
TDVNSGSPHSKAQNQQ

SEQ ID NO: 2458 - protein, 16 aa, synthetic construct
SDIGSGSPHSKAQNQQ

SEQ ID NO: 2459 - protein, 16 aa, synthetic construct
TINGSGSPHSKAQVPP

SEQ ID NO: 2460 - protein, 16 aa, synthetic construct
TINGSGSPHSKAQVQQ

SEQ ID NO: 2461 - protein, 16 aa, synthetic construct
TINGSGSPHSKALMRQ

SEQ ID NO: 2462 - protein, 16 aa, synthetic construct
TINGSGSPHSKAQYSV

SEQ ID NO: 2463 - protein, 16 aa, synthetic construct
NSIGSGSPHSKAQNQQ

SEQ ID NO: 2464 - protein, 16 aa, synthetic construct
TINGSGSPHSKVPNLQ

SEQ ID NO: 2465 - protein, 16 aa, synthetic construct
AINGSGSPHSKAQSQQ

SEQ ID NO: 2466 - protein, 16 aa, synthetic construct
TINGSGSPHSKAQAIT

SEQ ID NO: 2467 - protein, 16 aa, synthetic construct
TINGSGSPHSKAQKTL

SEQ ID NO: 2468 - protein, 16 aa, synthetic construct
TVNGSGSPHSKAQNQW

SEQ ID NO: 2469 - protein, 16 aa, synthetic construct
TINGSGSPHSKAQLHH

SEQ ID NO: 2470 - protein, 16 aa, synthetic construct
TEQTSGSPHSKAQNQQ

SEQ ID NO: 2471 - protein, 16 aa, synthetic construct
TINGSGSPHSKAQNII

SEQ ID NO: 2472 - protein, 16 aa, synthetic construct
NSLGSGSPHSKAQNQQ

SEQ ID NO: 2473 - protein, 16 aa, synthetic construct
TIPMEGSPHSKAQNQQ

SEQ ID NO: 2474 - protein, 16 aa, synthetic construct
TINGSGSPHSKAQGHH

SEQ ID NO: 2475 - protein, 16 aa, synthetic construct
TDRTSGSPHSKAQNQQ

SEQ ID NO: 2476 - protein, 16 aa, synthetic construct
TINGSGSPHSKAQSKV

SEQ ID NO: 2477 - protein, 16 aa, synthetic construct
EVVGSGSPHSKAQNQQ

SEQ ID NO: 2478 - protein, 16 aa, synthetic construct
TINGSGSPHSKAQLPS

SEQ ID NO: 2479 - protein, 16 aa, synthetic construct
TINGSGSPHSKAIGKQ

SEQ ID NO: 2480 - protein, 16 aa, synthetic construct
TEPTSGSPHSKAQNQQ

SEQ ID NO: 2481 - protein, 16 aa, synthetic construct
TVNGGGSPHSKSQNQQ

SEQ ID NO: 2482 - protein, 16 aa, synthetic construct
TINGSGSPHSKAQAIH

SEQ ID NO: 2483 - protein, 16 aa, synthetic construct
TINGSGSPHSKAQHGL

SEQ ID NO: 2484 - protein, 16 aa, synthetic construct
SELGSGSPHSKAQNQQ

SEQ ID NO: 2485 - protein, 16 aa, synthetic construct
TINGSGSPHSKAQFMC

SEQ ID NO: 2486 - protein, 16 aa, synthetic construct
TINVSGSPHSKAQGQQ

SEQ ID NO: 2487 - protein, 16 aa, synthetic construct
TINGGGSPHSKAQNQM

SEQ ID NO: 2488 - protein, 16 aa, synthetic construct
TVNGSGSPHSKAQHLQ

SEQ ID NO: 2489 - protein, 16 aa, synthetic construct
TIRENGSPHSKAQNQQ

SEQ ID NO: 2490 - protein, 16 aa, synthetic construct
TINGSGSPHSKTQNHQ

SEQ ID NO: 2491 - protein, 16 aa, synthetic construct
TINGSGSPHSKAQPAR

SEQ ID NO: 2492 - protein, 16 aa, synthetic construct
TVNGSGSPHSKAQSLQ

SEQ ID NO: 2493 - protein, 16 aa, synthetic construct
TINGSGSPHSKSQSQL

SEQ ID NO: 2494 - protein, 16 aa, synthetic construct
TINGSASPHSKAHSQQ

SEQ ID NO: 2495 - protein, 16 aa, synthetic construct
TWQNSGSPHSKAQNQQ

SEQ ID NO: 2496 - protein, 16 aa, synthetic construct
TINGSGSPHSKAQDRQ

SEQ ID NO: 2497 - protein, 16 aa, synthetic construct
TINGSGSPHSKAQMPS

SEQ ID NO: 2498 - protein, 16 aa, synthetic construct
TNNGGGSPHSKAQNLQ

SEQ ID NO: 2499 - protein, 16 aa, synthetic construct
TINGSGSPHSKAQGSL

SEQ ID NO: 2500 - protein, 16 aa, synthetic construct
TEVTSGSPHSKAQNQQ

SEQ ID NO: 2501 - protein, 16 aa, synthetic construct
SINGGGSPHSKAQYQQ

SEQ ID NO: 2502 - protein, 16 aa, synthetic construct
TVIGSGSPHSKSQNQQ

SEQ ID NO: 2503 - protein, 16 aa, synthetic construct
AVNVSGSPHSKAQNQQ

SEQ ID NO: 2504 - protein, 16 aa, synthetic construct
TVNGNGSPHSKSQNQQ

SEQ ID NO: 2505 - protein, 16 aa, synthetic construct
TDRNSGSPHSKAQNQQ

SEQ ID NO: 2506 - protein, 16 aa, synthetic construct
TINGSGSPHSKAQVPA

SEQ ID NO: 2507 - protein, 16 aa, synthetic construct
GVLGSGSPHSKAQNQQ

SEQ ID NO: 2508 - protein, 16 aa, synthetic construct
TLNGNGSPHSKAQNLQ

SEQ ID NO: 2509 - protein, 16 aa, synthetic construct
AINGSGSPHSKAQDKQ

SEQ ID NO: 2510 - protein, 16 aa, synthetic construct
TSNGSGSPHSKAHYQQ

SEQ ID NO: 2511 - protein, 16 aa, synthetic construct
TINGSGSPHSKAQVPS

SEQ ID NO: 2512 - protein, 16 aa, synthetic construct
TELRSGSPHSKAQNQQ

SEQ ID NO: 2513 - protein, 16 aa, synthetic construct
NINGSGSPHSKAQNHQ

SEQ ID NO: 2514 - protein, 16 aa, synthetic construct
TVNGGGSPHSKAQNHQ

SEQ ID NO: 2515 - protein, 16 aa, synthetic construct
TINGSGSPHSKARGEQ

SEQ ID NO: 2516 - protein, 16 aa, synthetic construct
TINGGGSPHSKAQYQH

SEQ ID NO: 2517 - protein, 16 aa, synthetic construct
TEDLSGSPHSKAQNQQ

SEQ ID NO: 2518 - protein, 16 aa, synthetic construct
TINGSGSPHSKAPGQQ

SEQ ID NO: 2519 - protein, 16 aa, synthetic construct
TIPKNGSPHSKAQNQQ

SEQ ID NO: 2520 - protein, 16 aa, synthetic construct
TINGSGSPHSKAQSLQ

SEQ ID NO: 2521 - protein, 16 aa, synthetic construct
TINGSGSPHSKRLEQQ

SEQ ID NO: 2522 - protein, 16 aa, synthetic construct
TERGSGSPHSKAQNQQ

SEQ ID NO: 2523 - protein, 16 aa, synthetic construct
TVNGSGSPHSKAPNQQ

SEQ ID NO: 2524 - protein, 16 aa, synthetic construct
TSNGSGSPHSKAQNQS

SEQ ID NO: 2525 - protein, 16 aa, synthetic construct
TINGSGSPHSKAQKVI

SEQ ID NO: 2526 - protein, 16 aa, synthetic construct
TEGISGSPHSKAQNQQ

SEQ ID NO: 2527 - protein, 16 aa, synthetic construct
TINGSGSPHSKAQNND

SEQ ID NO: 2528 - protein, 16 aa, synthetic construct
TINGSGSPHSKAQSVH

SEQ ID NO: 2529 - protein, 16 aa, synthetic construct
TINGSGSPHSKAQPLG

SEQ ID NO: 2530 - protein, 16 aa, synthetic construct
TINKEGSPHSKAQNQQ

SEQ ID NO: 2531 - protein, 16 aa, synthetic construct
TCNASGSPHSKAQNQQ

SEQ ID NO: 2532 - protein, 16 aa, synthetic construct
AINGSGSPHSKAHNQE

SEQ ID NO: 2533 - protein, 16 aa, synthetic construct
TEGLSGSPHSKAQNQQ

SEQ ID NO: 2534 - protein, 16 aa, synthetic construct
TRDASGSPHSKAQNQQ

SEQ ID NO: 2535 - protein, 16 aa, synthetic construct
TSNGSGSPHSKAQNLQ

SEQ ID NO: 2536 - protein, 16 aa, synthetic construct
TGNGSGSPHSKAQIQQ

SEQ ID NO: 2537 - protein, 16 aa, synthetic construct
TVNGGGSPHSKAQNLQ

SEQ ID NO: 2538 - protein, 16 aa, synthetic construct
TDRSSGSPHSKAQNQQ

SEQ ID NO: 2539 - protein, 16 aa, synthetic construct
TINGSGSPHSKAQVRN

SEQ ID NO: 2540 - protein, 16 aa, synthetic construct
TINGSGSPHSKAPSNQ

SEQ ID NO: 2541 - protein, 16 aa, synthetic construct
TINGSGSPHSKAQVGH

SEQ ID NO: 2542 - protein, 16 aa, synthetic construct
NAIGSGSPHSKAQNQQ

SEQ ID NO: 2543 - protein, 16 aa, synthetic construct
AENGSGSPHSKAQNQQ

SEQ ID NO: 2544 - protein, 16 aa, synthetic construct
TINGSGSPHSKAQRDI

SEQ ID NO: 2545 - protein, 16 aa, synthetic construct
TINGSGSPHSKAQMPN

SEQ ID NO: 2546 - protein, 16 aa, synthetic construct
TVNGSGSPHSKSQNQQ

SEQ ID NO: 2547 - protein, 16 aa, synthetic construct
TIPAIGSPHSKAQNQQ

SEQ ID NO: 2548 - protein, 16 aa, synthetic construct
TINGSGSPHSKARGLQ

SEQ ID NO: 2549 - protein, 16 aa, synthetic construct
TELGSGSPHSKAQNQQ

SEQ ID NO: 2550 - protein, 16 aa, synthetic construct
AETGSGSPHSKAQNQQ

SEQ ID NO: 2551 - protein, 16 aa, synthetic construct
TINGSGSPHSKLQKQQ

SEQ ID NO: 2552 - protein, 16 aa, synthetic construct
TINGSGSPHSKAPSLQ

SEQ ID NO: 2553 - protein, 16 aa, synthetic construct
TINGSGSPHSKAQRDQ

SEQ ID NO: 2554 - protein, 16 aa, synthetic construct
TDVGSGSPHSKAQNQQ

SEQ ID NO: 2555 - protein, 16 aa, synthetic construct
TINGSGSPHSKNRDQQ

SEQ ID NO: 2556 - protein, 16 aa, synthetic construct
SINGSGSPHSKAPNLQ

SEQ ID NO: 2557 - protein, 16 aa, synthetic construct
TINGSGSPHSKAQAKG

SEQ ID NO: 2558 - protein, 16 aa, synthetic construct
TVNGSGSPHSKAQDKQ

SEQ ID NO: 2559 - protein, 16 aa, synthetic construct
TINGGGSPHSKAQNPQ

SEQ ID NO: 2560 - protein, 16 aa, synthetic construct
TINGSGSPHSKAQSAH

SEQ ID NO: 2561 - protein, 16 aa, synthetic construct
TINGNGSPHSKSQNQH

SEQ ID NO: 2562 - protein, 16 aa, synthetic construct
TVPTSGSPHSKAQNQQ

SEQ ID NO: 2563 - protein, 16 aa, synthetic construct
TIDGSGSPHSKSQNHQ

SEQ ID NO: 2564 - protein, 16 aa, synthetic construct
TDVKSGSPHSKAQNQQ

SEQ ID NO: 2565 - protein, 16 aa, synthetic construct
AINRSGSPHSKAQDQQ

SEQ ID NO: 2566 - protein, 16 aa, synthetic construct
TINGSGSPHSKAQSTM

SEQ ID NO: 2567 - protein, 16 aa, synthetic construct
TVNASGSPHSKAQNQL

SEQ ID NO: 2568 - protein, 16 aa, synthetic construct
TINGSGSPHSKAQREM

SEQ ID NO: 2569 - protein, 16 aa, synthetic construct
TVHGSGSPHSKAQSQQ

SEQ ID NO: 2570 - protein, 16 aa, synthetic construct
TINGGGSPHSKSQNRQ

SEQ ID NO: 2571 - protein, 16 aa, synthetic construct
TINGSGSPHSKAQYRA

SEQ ID NO: 2572 - protein, 16 aa, synthetic construct
TINGGGSPHSKAQRQQ

SEQ ID NO: 2573 - protein, 16 aa, synthetic construct
TEPMSGSPHSKAQNQQ

SEQ ID NO: 2574 - protein, 16 aa, synthetic construct
TINGSGSPHSKNQWQQ

SEQ ID NO: 2575 - protein, 16 aa, synthetic construct
ETAGSGSPHSKAQNQQ

SEQ ID NO: 2576 - protein, 16 aa, synthetic construct
TINGSGSPHSKAQRMN

SEQ ID NO: 2577 - protein, 16 aa, synthetic construct
NNLGSGSPHSKAQNQQ

SEQ ID NO: 2578 - protein, 16 aa, synthetic construct
TINGSGSPHAKAQNHQ

SEQ ID NO: 2579 - protein, 16 aa, synthetic construct
TIIKNGSPHSKAQNQQ

SEQ ID NO: 2580 - protein, 16 aa, synthetic construct
TINGSGSPHSKAGDSQ

SEQ ID NO: 2581 - protein, 16 aa, synthetic construct
TINGSGSPHSKLKSQQ

SEQ ID NO: 2582 - protein, 16 aa, synthetic construct
TINGSGSPHSKAQKIS

SEQ ID NO: 2583 - protein, 16 aa, synthetic construct
TEYNSGSPHSKAQNQQ

SEQ ID NO: 2584 - protein, 16 aa, synthetic construct
TINGSGSPHSKAPSMQ

SEQ ID NO: 2585 - protein, 16 aa, synthetic construct
AINGSGSPHSKAQNQQ

SEQ ID NO: 2586 - protein, 16 aa, synthetic construct
TINGSGSPHSKASPRQ

SEQ ID NO: 2587 - protein, 16 aa, synthetic construct
TINGSGSPHSKRMEQQ

SEQ ID NO: 2588 - protein, 16 aa, synthetic construct
TINGSGSPHSKAQYQN

SEQ ID NO: 2589 - protein, 16 aa, synthetic construct
TINGSGSPHSKAQYYV

SEQ ID NO: 2590 - protein, 16 aa, synthetic construct
TINGSGSPHSKLRRQQ

SEQ ID NO: 2591 - protein, 16 aa, synthetic construct
TINGSGSPHSKAGCGQ

SEQ ID NO: 2592 - protein, 16 aa, synthetic construct
SMNGSGSPHSRAQNQQ

SEQ ID NO: 2593 - protein, 16 aa, synthetic construct
TINGSGSPHSKRLRQQ

SEQ ID NO: 2594 - protein, 16 aa, synthetic construct
TINGSGSPHSLRRNQQ

SEQ ID NO: 2595 - protein, 16 aa, synthetic construct
TINGSGSPHSRGRNQQ

SEQ ID NO: 2596 - protein, 16 aa, synthetic construct
TINGSGSPHSSRRNQQ

SEQ ID NO: 2597 - protein, 16 aa, synthetic construct
TINGSGSPHSKAFRLQ

SEQ ID NO: 2598 - protein, 16 aa, synthetic construct
TINGSCSPHRKAQNQQ

SEQ ID NO: 2599 - protein, 16 aa, synthetic construct
TINGSGSPHFLRQNQQ

SEQ ID NO: 2600 - protein, 16 aa, synthetic construct
TINGSGSPHSLRFNQQ

SEQ ID NO: 2601 - protein, 16 aa, synthetic construct
TINGSGSPHSKWLLQQ

SEQ ID NO: 2602 - protein, 16 aa, synthetic construct
TINGSGSPHSKRRLQQ

SEQ ID NO: 2603 - protein, 16 aa, synthetic construct
TINGSGSPHSKAQRKL

SEQ ID NO: 2604 - protein, 16 aa, synthetic construct
TINGSGSPHSKALRRQ

SEQ ID NO: 2605 - protein, 16 aa, synthetic construct
TINGSGSPHSKAQRLR

SEQ ID NO: 2606 - protein, 16 aa, synthetic construct
YLSGSGSPHSKAQNQQ

SEQ ID NO: 2607 - protein, 16 aa, synthetic construct
TINGSGSPHSKAQRRL

SEQ ID NO: 2608 - protein, 16 aa, synthetic construct
TINGSGSPHSKARRQQ

SEQ ID NO: 2609 - protein, 16 aa, synthetic construct
TINGSGSPHSKARRLQ

SEQ ID NO: 2610 - protein, 16 aa, synthetic construct
TINGSGSPHSKSRRQQ

SEQ ID NO: 2611 - protein, 16 aa, synthetic construct
TINGLLSPHWKAQNQQ

SEQ ID NO: 2612 - protein, 16 aa, synthetic construct
TINGSGSPHSKARLRQ

SEQ ID NO: 2613 - protein, 16 aa, synthetic construct
TINGSGSPHSKASKRQ

SEQ ID NO: 2614 - protein, 16 aa, synthetic construct
TINGSGSPHVRRQNQQ

SEQ ID NO: 2615 - protein, 16 aa, synthetic construct
TINGSGSPHSKAQLYR

SEQ ID NO: 2616 - protein, 16 aa, synthetic construct
GLSGSGSPHSKAQNQQ

SEQ ID NO: 2617 - protein, 16 aa, synthetic construct
TINGSGSPHSKAQLTV

SEQ ID NO: 2618 - protein, 16 aa, synthetic construct
TINGHDSPHKRGQHRQ

SEQ ID NO: 2619 - protein, 16 aa, synthetic construct
MPEGHDSPHKSGQNQQ

SEQ ID NO: 2620 - protein, 16 aa, synthetic construct
MEGGHDSPHKSGQNQQ

SEQ ID NO: 2621 - protein, 16 aa, synthetic construct
MEYGHDSPHKSGQNQQ

SEQ ID NO: 2622 - protein, 16 aa, synthetic construct
AEWGHDSPHKSGQNQQ

SEQ ID NO: 2623 - protein, 16 aa, synthetic construct
CEWGHDSPHKSGQNQQ

SEQ ID NO: 2624 - protein, 16 aa, synthetic construct
ANNGQDSPHKSGQNQQ

SEQ ID NO: 2625 - protein, 16 aa, synthetic construct
IPEGHDSPHKSGQNQQ

SEQ ID NO: 2626 - protein, 16 aa, synthetic construct
ADMGHDSPHKSGQNQQ

SEQ ID NO: 2627 - protein, 16 aa, synthetic construct
IEYGHDSPHKSGQNQQ

SEQ ID NO: 2628 - protein, 16 aa, synthetic construct
ADYGHDSPHKSGQNQQ

SEQ ID NO: 2629 - protein, 16 aa, synthetic construct
IETGHDSPHKSGQNQQ

SEQ ID NO: 2630 - protein, 16 aa, synthetic construct
MEWGHDSPHKSGQNQQ

SEQ ID NO: 2631 - protein, 16 aa, synthetic construct
CEYGHDSPHKSGQNQQ

SEQ ID NO: 2632 - protein, 16 aa, synthetic construct
RINGHDSPHKSGQKQQ

SEQ ID NO: 2633 - protein, 16 aa, synthetic construct
MEIGHDSPHKSGQNQQ

SEQ ID NO: 2634 - protein, 16 aa, synthetic construct
LEYGHDSPHKSGQNQQ

SEQ ID NO: 2635 - protein, 16 aa, synthetic construct
ADWGHDSPHKSGQNQQ

SEQ ID NO: 2636 - protein, 16 aa, synthetic construct
IEIGHDSPHKSGQNQQ

SEQ ID NO: 2637 - protein, 16 aa, synthetic construct
DIMGHDSPHKSGQNQQ

SEQ ID NO: 2638 - protein, 16 aa, synthetic construct
FEQGHDSPHKSGQNQQ

SEQ ID NO: 2639 - protein, 16 aa, synthetic construct
MEFGHDSPHKSGQNQQ

SEQ ID NO: 2640 - protein, 16 aa, synthetic construct
CDQGHDSPHKSGQNQQ

SEQ ID NO: 2641 - protein, 16 aa, synthetic construct
LPEGHDSPHKSGQNQQ

SEQ ID NO: 2642 - protein, 16 aa, synthetic construct
IENGHDSPHKSGQNQQ

SEQ ID NO: 2643 - protein, 16 aa, synthetic construct
MESGHDSPHKSGQNQQ

SEQ ID NO: 2644 - protein, 16 aa, synthetic construct
AEIGHDSPHKSGQNQQ

SEQ ID NO: 2645 - protein, 16 aa, synthetic construct
VEYGHDSPHKSGQNQQ

SEQ ID NO: 2646 - protein, 16 aa, synthetic construct
IINGHDSPHKSGLTQQ

SEQ ID NO: 2647 - protein, 16 aa, synthetic construct
TSNGDDSPHKSGRNQQ

SEQ ID NO: 2648 - protein, 16 aa, synthetic construct
IEVGHDSPHKSGQNQQ

SEQ ID NO: 2649 - protein, 16 aa, synthetic construct
MEMGHDSPHKSGQNQQ

SEQ ID NO: 2650 - protein, 16 aa, synthetic construct
AEVGHDSPHKSGQNQQ

SEQ ID NO: 2651 - protein, 16 aa, synthetic construct
MDAGHDSPHKSGQNQQ

SEQ ID NO: 2652 - protein, 16 aa, synthetic construct
VEWGHDSPHKSGQNQQ

SEQ ID NO: 2653 - protein, 16 aa, synthetic construct
AEQGHDSPHKSGQNQQ

SEQ ID NO: 2654 - protein, 16 aa, synthetic construct
LEWGHDSPHKSGQNQQ

SEQ ID NO: 2655 - protein, 16 aa, synthetic construct
MELGHDSPHKSGQNQQ

SEQ ID NO: 2656 - protein, 16 aa, synthetic construct
METGHDSPHKSGQNQQ

SEQ ID NO: 2657 - protein, 16 aa, synthetic construct
MEAGHDSPHKSGQNQQ

SEQ ID NO: 2658 - protein, 16 aa, synthetic construct
IESGHDSPHKSGQNQQ

SEQ ID NO: 2659 - protein, 16 aa, synthetic construct
MEVGHDSPHKSGQNQQ

SEQ ID NO: 2660 - protein, 16 aa, synthetic construct
CEIGHDSPHKSGQNQQ

SEQ ID NO: 2661 - protein, 16 aa, synthetic construct
ATNGHDSPHKSGLNQQ

SEQ ID NO: 2662 - protein, 16 aa, synthetic construct
MDGGHDSPHKSGQNQQ

SEQ ID NO: 2663 - protein, 16 aa, synthetic construct
QEVGHDSPHKSGQNQQ

SEQ ID NO: 2664 - protein, 16 aa, synthetic construct
ADQGHDSPHKSGQNQQ

SEQ ID NO: 2665 - protein, 16 aa, synthetic construct
TINGHESPHKSAQNHQ

SEQ ID NO: 2666 - protein, 16 aa, synthetic construct
TINGHDSPHKSAQNQW

SEQ ID NO: 2667 - protein, 16 aa, synthetic construct
NMNGHDSPHKSGQNTH

SEQ ID NO: 2668 - protein, 16 aa, synthetic construct
IEMGHDSPHKSGQNQQ

SEQ ID NO: 2669 - protein, 16 aa, synthetic construct
TINGHDSPHKSGRRRQ

SEQ ID NO: 2670 - protein, 16 aa, synthetic construct
ISNGHDSPHKSAQNQQ

SEQ ID NO: 2671 - protein, 16 aa, synthetic construct
TGNGHDSPHKSGQYQQ

SEQ ID NO: 2672 - protein, 16 aa, synthetic construct
TINGNYSPHKIGQNQQ

SEQ ID NO: 2673 - protein, 16 aa, synthetic construct
TINGHDSPHKSRQNDQ

SEQ ID NO: 2674 - protein, 16 aa, synthetic construct
QQQGHDSPHKSGQNQQ

SEQ ID NO: 2675 - protein, 16 aa, synthetic construct
HDWGHDSPHKSGQNQQ

SEQ ID NO: 2676 - protein, 16 aa, synthetic construct
IEGGHDSPHKSGQNQQ

SEQ ID NO: 2677 - protein, 16 aa, synthetic construct
TFNRSGSPHSKAQNQQ

SEQ ID NO: 2678 - protein, 16 aa, synthetic construct
AINGHDSPHKSGQIRQ

SEQ ID NO: 2679 - protein, 16 aa, synthetic construct
TINGHDSPHKIGQNQH

SEQ ID NO: 2680 - protein, 16 aa, synthetic construct
AINGYDSPHKSGQKQQ

SEQ ID NO: 2681 - protein, 16 aa, synthetic construct
TESGHDSPHKSGQNQQ

SEQ ID NO: 2682 - protein, 16 aa, synthetic construct
TINGHDSPHKSGQSVQ

SEQ ID NO: 2683 - protein, 16 aa, synthetic construct
TINGHESPHKSGRSQQ

SEQ ID NO: 2684 - protein, 16 aa, synthetic construct
TINGHDSPHKSGQNKL

SEQ ID NO: 2685 - protein, 16 aa, synthetic construct
TINGHDSPHKTGQNQQ

SEQ ID NO: 2686 - protein, 16 aa, synthetic construct
TINGRGSPHKRGQNQQ

SEQ ID NO: 2687 - protein, 16 aa, synthetic construct
TINGSGSPHTKAQNPP

SEQ ID NO: 2688 - protein, 16 aa, synthetic construct
TINGQDSPHKSGQHQQ

SEQ ID NO: 2689 - protein, 16 aa, synthetic construct
SINGHDSPHKSGQIQH

SEQ ID NO: 2690 - protein, 16 aa, synthetic construct
AINGHDSPHKSGPRQQ

SEQ ID NO: 2691 - protein, 16 aa, synthetic construct
TVNGHDSPHKSGHTQQ

SEQ ID NO: 2692 - protein, 16 aa, synthetic construct
SINGHDSPHKSGQRQH

SEQ ID NO: 2693 - protein, 16 aa, synthetic construct
SLNGSGSPHTKAQNQQ

SEQ ID NO: 2694 - protein, 16 aa, synthetic construct
AINGHDSPHKSAQSQQ

SEQ ID NO: 2695 - protein, 16 aa, synthetic construct
SIYGHESPHKSGQNQQ

SEQ ID NO: 2696 - protein, 16 aa, synthetic construct
TVNGHDSPHKSLQNQQ

SEQ ID NO: 2697 - protein, 16 aa, synthetic construct
TINGHGSPHSKAQNPQ

SEQ ID NO: 2698 - protein, 16 aa, synthetic construct
TSNGYDSPHKSGQKQQ

SEQ ID NO: 2699 - protein, 16 aa, synthetic construct
TVNGHDSPHKSGRNQE

SEQ ID NO: 2700 - protein, 16 aa, synthetic construct
TTNGHDSPHKSGQTQL

SEQ ID NO: 2701 - protein, 16 aa, synthetic construct
AINGHDSPHKSEKNQQ

SEQ ID NO: 2702 - protein, 16 aa, synthetic construct
IINGRDSPHKSGQDQQ

SEQ ID NO: 2703 - protein, 16 aa, synthetic construct
TISGHDSPHKTGHNQQ

SEQ ID NO: 2704 - protein, 16 aa, synthetic construct
SINGYDSPHKSGQTQQ

SEQ ID NO: 2705 - protein, 16 aa, synthetic construct
TINGHESPHKSGQTQQ

SEQ ID NO: 2706 - protein, 16 aa, synthetic construct
TINGHDSPHKSGQSKQ

SEQ ID NO: 2707 - protein, 16 aa, synthetic construct
AIIGHESPHKSGQNQQ

SEQ ID NO: 2708 - protein, 16 aa, synthetic construct
TINGHDSPHKTGQNQP

SEQ ID NO: 2709 - protein, 16 aa, synthetic construct
AINGHDSPHKSGQSPQ

SEQ ID NO: 2710 - protein, 16 aa, synthetic construct
TIKGNDSPHKSVQNQQ

SEQ ID NO: 2711 - protein, 16 aa, synthetic construct
TEFGHDSPHKSGQNQQ

SEQ ID NO: 2712 - protein, 16 aa, synthetic construct
TINGHDSPHKSAQNYQ

SEQ ID NO: 2713 - protein, 16 aa, synthetic construct
TFNGSASPHSKALNQQ

SEQ ID NO: 2714 - protein, 16 aa, synthetic construct
TINGHESPHKSAQNRQ

SEQ ID NO: 2715 - protein, 16 aa, synthetic construct
TTNGHDSPHKSGQNQQ

SEQ ID NO: 2716 - protein, 16 aa, synthetic construct
TIKGQDSPHKIGQNQQ

SEQ ID NO: 2717 - protein, 16 aa, synthetic construct
TVNGHDSPHKSGQNHL

SEQ ID NO: 2718 - protein, 16 aa, synthetic construct
SINGHDSPHKSGQYQH

SEQ ID NO: 2719 - protein, 16 aa, synthetic construct
TINGNDSPHKSVQNHQ

SEQ ID NO: 2720 - protein, 16 aa, synthetic construct
TITGHDSPHKSGQNQW

SEQ ID NO: 2721 - protein, 16 aa, synthetic construct
TNNGHDSPHKSVQNQH

SEQ ID NO: 2722 - protein, 16 aa, synthetic construct
TIDGHDSPHKSGQNQH

SEQ ID NO: 2723 - protein, 16 aa, synthetic construct
TVNGHDSPHKSGQTRQ

SEQ ID NO: 2724 - protein, 16 aa, synthetic construct
TVNGHDSPHKSGQNLH

SEQ ID NO: 2725 - protein, 16 aa, synthetic construct
AISGHDSPHKSGLNQQ

SEQ ID NO: 2726 - protein, 16 aa, synthetic construct
AINGHDSPHKSAQNQE

SEQ ID NO: 2727 - protein, 16 aa, synthetic construct
TITGHDSPHKSGQHLQ

SEQ ID NO: 2728 - protein, 16 aa, synthetic construct
TINGHDSPHKSRLNQP

SEQ ID NO: 2729 - protein, 16 aa, synthetic construct
TVDGHDSPHKSGQKQQ

SEQ ID NO: 2730 - protein, 16 aa, synthetic construct
TINGQDSPHKSGQNQD

SEQ ID NO: 2731 - protein, 16 aa, synthetic construct
TIEGHDSPHKSGRNQQ

SEQ ID NO: 2732 - protein, 16 aa, synthetic construct
TTNGHDSPHKSGQNLL

SEQ ID NO: 2733 - protein, 16 aa, synthetic construct
TINGHDSPHKSGQLVI

SEQ ID NO: 2734 - protein, 16 aa, synthetic construct
TVNGHDSPHKSRQSQQ

SEQ ID NO: 2735 - protein, 16 aa, synthetic construct
TINGHDSPHKSGRTQE

SEQ ID NO: 2736 - protein, 16 aa, synthetic construct
TINGHDSPHKSVQTHQ

SEQ ID NO: 2737 - protein, 16 aa, synthetic construct
TSNGHDSPHKSGQNQP

SEQ ID NO: 2738 - protein, 16 aa, synthetic construct
VINGHDSPHKSGQTQQ

SEQ ID NO: 2739 - protein, 16 aa, synthetic construct
TINGPDSPHKIGQNQQ

SEQ ID NO: 2740 - protein, 16 aa, synthetic construct
AVNGHDSPHKSVQNQQ

SEQ ID NO: 2741 - protein, 16 aa, synthetic construct
TINGHDSPHKSRQDQH

SEQ ID NO: 2742 - protein, 16 aa, synthetic construct
AINGPDSPHKSGQKQQ

SEQ ID NO: 2743 - protein, 16 aa, synthetic construct
TINGHDSPHKSRQSQH

SEQ ID NO: 2744 - protein, 16 aa, synthetic construct
TIYGHDSPHKSVQNQL

SEQ ID NO: 2745 - protein, 16 aa, synthetic construct
TVNGHDSPHKSGQNLL

SEQ ID NO: 2746 - protein, 16 aa, synthetic construct
TENKSGSPHSKAQNQQ

SEQ ID NO: 2747 - protein, 16 aa, synthetic construct
TTNGQDSPHKSGQNQQ

SEQ ID NO: 2748 - protein, 16 aa, synthetic construct
TDKGSGSPHSKAQNQQ

SEQ ID NO: 2749 - protein, 16 aa, synthetic construct
TIDGHDSPHKSGRNQQ

SEQ ID NO: 2750 - protein, 16 aa, synthetic construct
TINGYDSPHKSGQYQH

SEQ ID NO: 2751 - protein, 16 aa, synthetic construct
TDNGHDSPHKSRQNQQ

SEQ ID NO: 2752 - protein, 16 aa, synthetic construct
TINGHDSPHKSWVRQQ

SEQ ID NO: 2753 - protein, 16 aa, synthetic construct
TINGHESPHKSGQNQH

SEQ ID NO: 2754 - protein, 16 aa, synthetic construct
TVNGHDSPHKIGHNQQ

SEQ ID NO: 2755 - protein, 16 aa, synthetic construct
TCNGHDSPHKSGRNQQ

SEQ ID NO: 2756 - protein, 16 aa, synthetic construct
TINGNGSPHSKAQNHQ

SEQ ID NO: 2757 - protein, 16 aa, synthetic construct
NVVGHDSPHKSGQNQQ

SEQ ID NO: 2758 - protein, 16 aa, synthetic construct
TINGHDSPHKSNAWQQ

SEQ ID NO: 2759 - protein, 16 aa, synthetic construct
TDAGHDSPHKSGQNQQ

SEQ ID NO: 2760 - protein, 16 aa, synthetic construct
TEVGHDSPHKSGQNQQ

SEQ ID NO: 2761 - protein, 16 aa, synthetic construct
SELGHDSPHKSGQNQQ

SEQ ID NO: 2762 - protein, 16 aa, synthetic construct
TINGHDSPHKSGQSVP

SEQ ID NO: 2763 - protein, 16 aa, synthetic construct
TINGHESPHKSGQNIQ

SEQ ID NO: 2764 - protein, 16 aa, synthetic construct
TINGHDSPHKSVQNHL

SEQ ID NO: 2765 - protein, 16 aa, synthetic construct
TINGHDSPHKIGLDQQ

SEQ ID NO: 2766 - protein, 16 aa, synthetic construct
TSNASGSPHSKAQHQQ

SEQ ID NO: 2767 - protein, 16 aa, synthetic construct
TINGHDSPHKRGPDQQ

SEQ ID NO: 2768 - protein, 16 aa, synthetic construct
TINGMGSPHSKTQNQQ

SEQ ID NO: 2769 - protein, 16 aa, synthetic construct
TIKGHDSPHKSGESQQ

SEQ ID NO: 2770 - protein, 16 aa, synthetic construct
TINGHDSPHKHGQNHQ

SEQ ID NO: 2771 - protein, 16 aa, synthetic construct
TVNGTGSPHSKAQNQL

SEQ ID NO: 2772 - protein, 16 aa, synthetic construct
TIIGHDSPHKSGQYQH

SEQ ID NO: 2773 - protein, 16 aa, synthetic construct
TSNGHDSPHKSVQNKQ

SEQ ID NO: 2774 - protein, 16 aa, synthetic construct
IVNGQVSPHKSGQNQQ

SEQ ID NO: 2775 - protein, 16 aa, synthetic construct
TVNGHDSPHKSGQRQL

SEQ ID NO: 2776 - protein, 16 aa, synthetic construct
TVNGHDSPHKIGQNQL

SEQ ID NO: 2777 - protein, 16 aa, synthetic construct
TINGHDSPHKSGQIIV

SEQ ID NO: 2778 - protein, 16 aa, synthetic construct
IGNGHESPHKSGQNQQ

SEQ ID NO: 2779 - protein, 16 aa, synthetic construct
EVMGHDSPHKSGQNQQ

SEQ ID NO: 2780 - protein, 16 aa, synthetic construct
TINGYDSPHKSGQKQS

SEQ ID NO: 2781 - protein, 16 aa, synthetic construct
TIHGNGSPHSKAQNQE

SEQ ID NO: 2782 - protein, 16 aa, synthetic construct
YQVGHDSPHKSGQNQQ

SEQ ID NO: 2783 - protein, 16 aa, synthetic construct
TIKGDDSPHKSVQNQQ

SEQ ID NO: 2784 - protein, 16 aa, synthetic construct
TINGHDSPHKSVQSHQ

SEQ ID NO: 2785 - protein, 16 aa, synthetic construct
TINGHDSPHKSGQFVV

SEQ ID NO: 2786 - protein, 16 aa, synthetic construct
TVNGHDSPHKSRQNLQ

SEQ ID NO: 2787 - protein, 16 aa, synthetic construct
ATNGHNSPHKSGQNQE

SEQ ID NO: 2788 - protein, 16 aa, synthetic construct
AINGHDSPHKSAQNQQ

SEQ ID NO: 2789 - protein, 16 aa, synthetic construct
TEHGHDSPHKSGQNQQ

SEQ ID NO: 2790 - protein, 16 aa, synthetic construct
TIYGHDSPHKSGQSQP

SEQ ID NO: 2791 - protein, 16 aa, synthetic construct
TISGHESPHKSGQNEQ

SEQ ID NO: 2792 - protein, 16 aa, synthetic construct
AIIGHDSPHKSAQNQQ

SEQ ID NO: 2793 - protein, 16 aa, synthetic construct
AIDGHDSPHKSGQNQL

SEQ ID NO: 2794 - protein, 16 aa, synthetic construct
TIMGHDSPHKSVQNQQ

SEQ ID NO: 2795 - protein, 16 aa, synthetic construct
EVGGHDSPHKSGQNQQ

SEQ ID NO: 2796 - protein, 16 aa, synthetic construct
TINGHDSPHKSAQNLL

SEQ ID NO: 2797 - protein, 16 aa, synthetic construct
TINASGSPHSKAINQQ

SEQ ID NO: 2798 - protein, 16 aa, synthetic construct
AINGNGSPHKRGQNQQ

SEQ ID NO: 2799 - protein, 16 aa, synthetic construct
SEMGHDSPHKSGQNQQ

SEQ ID NO: 2800 - protein, 16 aa, synthetic construct
AQQGHDSPHKSGQNQQ

SEQ ID NO: 2801 - protein, 16 aa, synthetic construct
AINGHDSPHKSGQSLQ

SEQ ID NO: 2802 - protein, 16 aa, synthetic construct
TINGSGSPHSKAPNQQ

SEQ ID NO: 2803 - protein, 16 aa, synthetic construct
CGEGHDSPHKSGQNQQ

SEQ ID NO: 2804 - protein, 16 aa, synthetic construct
TVNGHDSPHKSAQNHQ

SEQ ID NO: 2805 - protein, 16 aa, synthetic construct
TVNGHDSPHKSGQTQL

SEQ ID NO: 2806 - protein, 16 aa, synthetic construct
TNNGHDSPHKSGRNRQ

SEQ ID NO: 2807 - protein, 16 aa, synthetic construct
TINGHDSPHKYGQNEQ

SEQ ID NO: 2808 - protein, 16 aa, synthetic construct
TINGNGSPHSKAPNLQ

SEQ ID NO: 2809 - protein, 16 aa, synthetic construct
SINGHDSPHKSQQNQQ

SEQ ID NO: 2810 - protein, 16 aa, synthetic construct
TIGGHDSPHKSGQNQQ

SEQ ID NO: 2811 - protein, 16 aa, synthetic construct
TINGHDSPHKSVQSKQ

SEQ ID NO: 2812 - protein, 16 aa, synthetic construct
ELVGHDSPHKSGQNQQ

SEQ ID NO: 2813 - protein, 16 aa, synthetic construct
ELMGHDSPHKSGQNQQ

SEQ ID NO: 2814 - protein, 16 aa, synthetic construct
TINGNDSPHKIGHNQQ

SEQ ID NO: 2815 - protein, 16 aa, synthetic construct
TIKGGGSPHSKAQDQQ

SEQ ID NO: 2816 - protein, 16 aa, synthetic construct
TVNGHDSPHKSGQTQQ

SEQ ID NO: 2817 - protein, 16 aa, synthetic construct
TINGQDSPHKSGQNPL

SEQ ID NO: 2818 - protein, 16 aa, synthetic construct
TVNASGSPHSKAQNHQ

SEQ ID NO: 2819 - protein, 16 aa, synthetic construct
TINGHDSPHKSGRDQK

SEQ ID NO: 2820 - protein, 16 aa, synthetic construct
TINGHDSPHKSVHNQQ

SEQ ID NO: 2821 - protein, 16 aa, synthetic construct
TINGHDSPHKSGQWKR

SEQ ID NO: 2822 - protein, 16 aa, synthetic construct
TIDGSGSPHSKAENRQ

SEQ ID NO: 2823 - protein, 16 aa, synthetic construct
NEIGHDSPHKSGQNQQ

SEQ ID NO: 2824 - protein, 16 aa, synthetic construct
AINGHDSPHKSGQSQQ

SEQ ID NO: 2825 - protein, 16 aa, synthetic construct
IINGHDSPHKSRQAQQ

SEQ ID NO: 2826 - protein, 16 aa, synthetic construct
TPNGHDSPHKSGQNQQ

SEQ ID NO: 2827 - protein, 16 aa, synthetic construct
ITNGHDSPHKSGQTQQ

SEQ ID NO: 2828 - protein, 16 aa, synthetic construct
TINGHDSPHKSVQNHQ

SEQ ID NO: 2829 - protein, 16 aa, synthetic construct
TINGHDSPHKSKQNQQ

SEQ ID NO: 2830 - protein, 16 aa, synthetic construct
TINGHDSPHKSAQNQL

SEQ ID NO: 2831 - protein, 16 aa, synthetic construct
TVNGHDSPHKSGQTQP

SEQ ID NO: 2832 - protein, 16 aa, synthetic construct
TDQGHDSPHKSGQNQQ

SEQ ID NO: 2833 - protein, 16 aa, synthetic construct
TINGHDSPHKLWINQQ

SEQ ID NO: 2834 - protein, 16 aa, synthetic construct
GINGPDSPHKSGQNQQ

SEQ ID NO: 2835 - protein, 16 aa, synthetic construct
SEIGHDSPHKSGQNQQ

SEQ ID NO: 2836 - protein, 16 aa, synthetic construct
TINGHDSPHKSVQKQL

SEQ ID NO: 2837 - protein, 16 aa, synthetic construct
TINGHPSPHWKGQNQQ

SEQ ID NO: 2838 - protein, 16 aa, synthetic construct
TVNGHDSPHKSGRNQL

SEQ ID NO: 2839 - protein, 16 aa, synthetic construct
TIKGSGSPHSKVQDQQ

SEQ ID NO: 2840 - protein, 16 aa, synthetic construct
SEKGHDSPHKSGQNQQ

SEQ ID NO: 2841 - protein, 16 aa, synthetic construct
WSAGHDSPHKSGQNQQ

SEQ ID NO: 2842 - protein, 16 aa, synthetic construct
ELAGHDSPHKSGQNQQ

SEQ ID NO: 2843 - protein, 16 aa, synthetic construct
TINGHDSPHKMGRNQQ

SEQ ID NO: 2844 - protein, 16 aa, synthetic construct
TINGHDSPHKSGISIQ

SEQ ID NO: 2845 - protein, 16 aa, synthetic construct
TSNGHDSPHKSVQNLQ

SEQ ID NO: 2846 - protein, 16 aa, synthetic construct
QTQGHDSPHKSGQNQQ

SEQ ID NO: 2847 - protein, 16 aa, synthetic construct
TINGHDSPHKMAHNQQ

SEQ ID NO: 2848 - protein, 16 aa, synthetic construct
AINGSGSPHSKAQTQQ

SEQ ID NO: 2849 - protein, 16 aa, synthetic construct
TINGHDSPHKHGQNQQ

SEQ ID NO: 2850 - protein, 16 aa, synthetic construct
GADGHDSPHKSGQNQQ

SEQ ID NO: 2851 - protein, 16 aa, synthetic construct
VGEGHDSPHKSGQNQQ

SEQ ID NO: 2852 - protein, 16 aa, synthetic construct
ANEGHDSPHKSGQNQQ

SEQ ID NO: 2853 - protein, 16 aa, synthetic construct
TEAKSGSPHSKAQNQQ

SEQ ID NO: 2854 - protein, 16 aa, synthetic construct
TINGHDSPHKSVQSQQ

SEQ ID NO: 2855 - protein, 16 aa, synthetic construct
TIPGSGSPHSKAQNLQ

SEQ ID NO: 2856 - protein, 16 aa, synthetic construct
TINGHDSPHKSGQTVC

SEQ ID NO: 2857 - protein, 16 aa, synthetic construct
ELRGHDSPHKSGQNQQ

SEQ ID NO: 2858 - protein, 16 aa, synthetic construct
CQIGHDSPHKSGQNQQ

SEQ ID NO: 2859 - protein, 16 aa, synthetic construct
GVMGHDSPHKSGQNQQ

SEQ ID NO: 2860 - protein, 16 aa, synthetic construct
ACDGHDSPHKSGQNQQ

SEQ ID NO: 2861 - protein, 16 aa, synthetic construct
TINGQDSPHKSGQYQQ

SEQ ID NO: 2862 - protein, 16 aa, synthetic construct
TINGHDSPHKSGQQIM

SEQ ID NO: 2863 - protein, 16 aa, synthetic construct
TINGHDSPHKSRQNEQ

SEQ ID NO: 2864 - protein, 16 aa, synthetic construct
ASNGHDSPHKSGLNHQ

SEQ ID NO: 2865 - protein, 16 aa, synthetic construct
TVNGHDSPHKSGQSQP

SEQ ID NO: 2866 - protein, 16 aa, synthetic construct
NELGHDSPHKSGQNQQ

SEQ ID NO: 2867 - protein, 16 aa, synthetic construct
AAEGHDSPHKSGQNQQ

SEQ ID NO: 2868 - protein, 16 aa, synthetic construct
GQNGHDSPHKSGQNQQ

SEQ ID NO: 2869 - protein, 16 aa, synthetic construct
NEFGHDSPHKSGQNQQ

SEQ ID NO: 2870 - protein, 16 aa, synthetic construct
TSIGYDSPHKSGQNQQ

SEQ ID NO: 2871 - protein, 16 aa, synthetic construct
TDNGHDSPHKSGQNLQ

SEQ ID NO: 2872 - protein, 16 aa, synthetic construct
TITGHDSPHKSRQDQQ

SEQ ID NO: 2873 - protein, 16 aa, synthetic construct
AEHGHDSPHKSGQNQQ

SEQ ID NO: 2874 - protein, 16 aa, synthetic construct
TINGDDSPHKSGQKQL

SEQ ID NO: 2875 - protein, 16 aa, synthetic construct
EILGHDSPHKSGQNQQ

SEQ ID NO: 2876 - protein, 16 aa, synthetic construct
TIHGSGSPHSKAQNQA

SEQ ID NO: 2877 - protein, 16 aa, synthetic construct
AINGDDSPHKSGHNQQ

SEQ ID NO: 2878 - protein, 16 aa, synthetic construct
TSNGHNSPHKSGQNQE

SEQ ID NO: 2879 - protein, 16 aa, synthetic construct
TINGHDSPHKSGQMIH

SEQ ID NO: 2880 - protein, 16 aa, synthetic construct
NAIGHDSPHKSGQNQQ

SEQ ID NO: 2881 - protein, 16 aa, synthetic construct
VINGHDSPHKSGRNHQ

SEQ ID NO: 2882 - protein, 16 aa, synthetic construct
TITGHDSPHKSVQNRQ

SEQ ID NO: 2883 - protein, 16 aa, synthetic construct
TINGHDSPHKSGQKMN

SEQ ID NO: 2884 - protein, 16 aa, synthetic construct
TIHGHDSPHKSGQSQQ

SEQ ID NO: 2885 - protein, 16 aa, synthetic construct
TEIGHDSPHKSGQNQQ

SEQ ID NO: 2886 - protein, 16 aa, synthetic construct
TINGHDSPHKSGQYQH

SEQ ID NO: 2887 - protein, 14 aa, synthetic construct
GSGSPHSKAQNRHT

SEQ ID NO: 2888 - protein, 14 aa, synthetic construct
GSGSPHSKVQNQQT

SEQ ID NO: 2889 - protein, 14 aa, synthetic construct
MSGSPHSKAQNQQT

SEQ ID NO: 2890 - protein, 14 aa, synthetic construct
GSGSPHSKARDQQT

SEQ ID NO: 2891 - protein, 14 aa, synthetic construct
GSGSPHSKAPNLQT

SEQ ID NO: 2892 - protein, 14 aa, synthetic construct
TSGSPHSKAQNQQT

SEQ ID NO: 2893 - protein, 14 aa, synthetic construct
GSGSPHSKAHVRQT

SEQ ID NO: 2894 - protein, 14 aa, synthetic construct
GSGSPHSKAPNQHT

SEQ ID NO: 2895 - protein, 14 aa, synthetic construct
ISGSPHSKAQNQQT

SEQ ID NO: 2896 - protein, 14 aa, synthetic construct
GSGSPHSKTQSQQT

SEQ ID NO: 2897 - protein, 5 aa, synthetic construct
SVSPH

SEQ ID NO: 2898 - protein, 14 aa, synthetic construct
ESGSPHSKAQNQQI

SEQ ID NO: 2899 - protein, 14 aa, synthetic construct
GSGSPHSKAQPAKT

SEQ ID NO: 2900 - protein, 14 aa, synthetic construct
SSGSPHSKAQNQQT

SEQ ID NO: 2901 - protein, 14 aa, synthetic construct
GSGSPHSKSQTQQN

SEQ ID NO: 2902 - protein, 14 aa, synthetic construct
ASGSPHSKAQNQQT

SEQ ID NO: 2903 - protein, 14 aa, synthetic construct
GSGSPHSKAQNLAT

SEQ ID NO: 2904 - protein, 14 aa, synthetic construct
GSGSPHSKSQNQLT

SEQ ID NO: 2905 - protein, 14 aa, synthetic construct
NSGSPHSKAQNQQT

SEQ ID NO: 2906 - protein, 14 aa, synthetic construct
GSGSPHSKAQGQQT

SEQ ID NO: 2907 - protein, 5 aa, synthetic construct
IGSPH

SEQ ID NO: 2908 - protein, 14 aa, synthetic construct
GSGSPHSKALNRQS

SEQ ID NO: 2909 - protein, 14 aa, synthetic construct
LSGSPHSKAQNQQT

SEQ ID NO: 2910 - protein, 14 aa, synthetic construct
GSGSPHSKAHNQQT

SEQ ID NO: 2911 - protein, 14 aa, synthetic construct
GSGSPHSKTQNQQT

SEQ ID NO: 2912 - protein, 14 aa, synthetic construct
GSGSPHSKAQNPPT

SEQ ID NO: 2913 - protein, 14 aa, synthetic construct
GSGSPHSKAQNLQT

SEQ ID NO: 2914 - protein, 14 aa, synthetic construct
GSGSPHSKAQYQQT

SEQ ID NO: 2915 - protein, 14 aa, synthetic construct
GSGSPHSKAQDQET

SEQ ID NO: 2916 - protein, 14 aa, synthetic construct
KSGSPHSKAQNQQT

SEQ ID NO: 2917 - protein, 5 aa, synthetic construct
DGSPH

SEQ ID NO: 2918 - protein, 14 aa, synthetic construct
GSGSPHSKAQDQQT

SEQ ID NO: 2919 - protein, 14 aa, synthetic construct
GSGSPHSKGHWQQT

SEQ ID NO: 2920 - protein, 14 aa, synthetic construct
GSGSPHSKAPNQQT

SEQ ID NO: 2921 - protein, 14 aa, synthetic construct
GSGSPHSKAQNQLI

SEQ ID NO: 2922 - protein, 14 aa, synthetic construct
GSGSPHSKRPEQQT

SEQ ID NO: 2923 - protein, 14 aa, synthetic construct
GSGSPHSKAQRTMT

SEQ ID NO: 2924 - protein, 14 aa, synthetic construct
GSGSPHSKAQNQQH

SEQ ID NO: 2925 - protein, 14 aa, synthetic construct
HSGSPHSKAQNQQT

SEQ ID NO: 2926 - protein, 14 aa, synthetic construct
GSGSPHSKALHQHT

SEQ ID NO: 2927 - protein, 14 aa, synthetic construct
GSGSPHSKAQHRIT

SEQ ID NO: 2928 - protein, 14 aa, synthetic construct
GSGSPHSKAQYIHT

SEQ ID NO: 2929 - protein, 14 aa, synthetic construct
GSGSPHSKAQKFET

SEQ ID NO: 2930 - protein, 14 aa, synthetic construct
ESGSPHSKAQNHQT

SEQ ID NO: 2931 - protein, 14 aa, synthetic construct
GSGSPHSKAQFPST

SEQ ID NO: 2932 - protein, 14 aa, synthetic construct
PSGSPHSKAQNQQT

SEQ ID NO: 2933 - protein, 14 aa, synthetic construct
GSGSPHSKAHNQQR

SEQ ID NO: 2934 - protein, 14 aa, synthetic construct
GSGSPHSKAQAIKT

SEQ ID NO: 2935 - protein, 14 aa, synthetic construct
GSGSPHSKGQNRQT

SEQ ID NO: 2936 - protein, 14 aa, synthetic construct
GSGSPHSKAQSQQT

SEQ ID NO: 2937 - protein, 14 aa, synthetic construct
ASGSPHSKAQNQLT

SEQ ID NO: 2938 - protein, 14 aa, synthetic construct
RSGSPHSKAQNQQT

SEQ ID NO: 2939 - protein, 14 aa, synthetic construct
GSGSPHSKAQYQHT

SEQ ID NO: 2940 - protein, 14 aa, synthetic construct
GSGSPHTKAQNPQS

SEQ ID NO: 2941 - protein, 14 aa, synthetic construct
GSGSPHSKGQNPPT

SEQ ID NO: 2942 - protein, 14 aa, synthetic construct
GSGSPHSKAQHQLT

SEQ ID NO: 2943 - protein, 14 aa, synthetic construct
GSGSPHSKAQSPPT

SEQ ID NO: 2944 - protein, 14 aa, synthetic construct
GSGSPHSKAQAKLT

SEQ ID NO: 2945 - protein, 14 aa, synthetic construct
GSGSPHSKTKSQQT

SEQ ID NO: 2946 - protein, 14 aa, synthetic construct
GSGSPHSKAQDRPT

SEQ ID NO: 2947 - protein, 14 aa, synthetic construct
GSGSPHSKAQSQQL

SEQ ID NO: 2948 - protein, 14 aa, synthetic construct
GSGSPHSKAQAFHT

SEQ ID NO: 2949 - protein, 14 aa, synthetic construct
GSGSPHSKAQKQQD

SEQ ID NO: 2950 - protein, 14 aa, synthetic construct
GSGSPHSKAQNAQT

SEQ ID NO: 2951 - protein, 14 aa, synthetic construct
WSGSPHSKAQNQQT

SEQ ID NO: 2952 - protein, 14 aa, synthetic construct
GSGSPHSKAHNQLT

SEQ ID NO: 2953 - protein, 14 aa, synthetic construct
GSGSPHSKAQNQQY

SEQ ID NO: 2954 - protein, 14 aa, synthetic construct
GSGSPHSKAQKLNT

SEQ ID NO: 2955 - protein, 14 aa, synthetic construct
GSGSPHSKSQNVQT

SEQ ID NO: 2956 - protein, 14 aa, synthetic construct
GSGSPHSKAQAQQT

SEQ ID NO: 2957 - protein, 14 aa, synthetic construct
GSGSPHSKAQNLQA

SEQ ID NO: 2958 - protein, 14 aa, synthetic construct
DSGSPHSKAQNQQT

SEQ ID NO: 2959 - protein, 14 aa, synthetic construct
ASGSPHSKAPNQQT

SEQ ID NO: 2960 - protein, 14 aa, synthetic construct
GSGSPHSKAQTPPT

SEQ ID NO: 2961 - protein, 14 aa, synthetic construct
GSGSPHSKAQYQHA

SEQ ID NO: 2962 - protein, 14 aa, synthetic construct
GSGSPHSKAQGQQA

SEQ ID NO: 2963 - protein, 14 aa, synthetic construct
GSGSPHNKAQNHQT

SEQ ID NO: 2964 - protein, 14 aa, synthetic construct
GSGSPHSKAQPPAT

SEQ ID NO: 2965 - protein, 14 aa, synthetic construct
GSGSPHSKAQERPT

SEQ ID NO: 2966 - protein, 14 aa, synthetic construct
GSGSPHSKAQDLQT

SEQ ID NO: 2967 - protein, 14 aa, synthetic construct
GSGSPHSKAQAMHT

SEQ ID NO: 2968 - protein, 14 aa, synthetic construct
GSGSPHSKALNQQT

SEQ ID NO: 2969 - protein, 14 aa, synthetic construct
GSGSPHSKAQHPST

SEQ ID NO: 2970 - protein, 14 aa, synthetic construct
GSGSPHSKAPGLQT

SEQ ID NO: 2971 - protein, 14 aa, synthetic construct
GSGSPHSKAQGIRT

SEQ ID NO: 2972 - protein, 14 aa, synthetic construct
GSGSPHSKAQAPAT

SEQ ID NO: 2973 - protein, 14 aa, synthetic construct
GSGSPHSKSQSQQI

SEQ ID NO: 2974 - protein, 14 aa, synthetic construct
GSGSPHSKAQIPPT

SEQ ID NO: 2975 - protein, 14 aa, synthetic construct
GSGSPHSKAQTQLT

SEQ ID NO: 2976 - protein, 14 aa, synthetic construct
GSGSPHSKAQAPST

SEQ ID NO: 2977 - protein, 14 aa, synthetic construct
GSGSPHSKGQNQQT

SEQ ID NO: 2978 - protein, 14 aa, synthetic construct
ASGSPHSKAHNQQT

SEQ ID NO: 2979 - protein, 14 aa, synthetic construct
GSGSPHSKAQNTYA

SEQ ID NO: 2980 - protein, 14 aa, synthetic construct
GSGSPHSKSQNQHI

SEQ ID NO: 2981 - protein, 14 aa, synthetic construct
GSGSPHSKAQNHLT

SEQ ID NO: 2982 - protein, 14 aa, synthetic construct
GSGSPHSKAQIGMT

SEQ ID NO: 2983 - protein, 14 aa, synthetic construct
GSGSPHSKALNKQT

SEQ ID NO: 2984 - protein, 14 aa, synthetic construct
GSGSPHSKAQLQQT

SEQ ID NO: 2985 - protein, 14 aa, synthetic construct
GSGSPHSKAQRMST

SEQ ID NO: 2986 - protein, 14 aa, synthetic construct
GSGSPHSKAQGILT

SEQ ID NO: 2987 - protein, 14 aa, synthetic construct
GSGSPHSKAQDRQT

SEQ ID NO: 2988 - protein, 14 aa, synthetic construct
GSGSPHSKARDWQT

SEQ ID NO: 2989 - protein, 14 aa, synthetic construct
GSGSPHSKAQNTHD

SEQ ID NO: 2990 - protein, 14 aa, synthetic construct
GSGSPHSKAPNLQI

SEQ ID NO: 2991 - protein, 14 aa, synthetic construct
GSGSPHSKAQERST

SEQ ID NO: 2992 - protein, 14 aa, synthetic construct
GSGSPHSKAQNYQT

SEQ ID NO: 2993 - protein, 14 aa, synthetic construct
GSGSPHSKAQRTCT

SEQ ID NO: 2994 - protein, 14 aa, synthetic construct
GSGSPHSKAQIGHT

SEQ ID NO: 2995 - protein, 14 aa, synthetic construct
GSGSPHSKAQGAIT

SEQ ID NO: 2996 - protein, 14 aa, synthetic construct
GSGSPHSKAQVPPT

SEQ ID NO: 2997 - protein, 14 aa, synthetic construct
GSGSPHSKAQVQQI

SEQ ID NO: 2998 - protein, 14 aa, synthetic construct
GSGSPHSKALMRQT

SEQ ID NO: 2999 - protein, 14 aa, synthetic construct
GSGSPHSKAQYSVT

SEQ ID NO: 3000 - protein, 14 aa, synthetic construct
GSGSPHSKVPNLQT

SEQ ID NO: 3001 - protein, 14 aa, synthetic construct
GSGSPHSKAQSQQI

SEQ ID NO: 3002 - protein, 14 aa, synthetic construct
GSGSPHSKAQAITT

SEQ ID NO: 3003 - protein, 14 aa, synthetic construct
GSGSPHSKAQKTLT

SEQ ID NO: 3004 - protein, 14 aa, synthetic construct
GSGSPHSKAQNQWT

SEQ ID NO: 3005 - protein, 14 aa, synthetic construct
GSGSPHSKAQLHHT

SEQ ID NO: 3006 - protein, 14 aa, synthetic construct
GSGSPHSKAQNIII

SEQ ID NO: 3007 - protein, 14 aa, synthetic construct
GSGSPHSKAQGHHT

SEQ ID NO: 3008 - protein, 14 aa, synthetic construct
GSGSPHSKAQSKVT

SEQ ID NO: 3009 - protein, 14 aa, synthetic construct
GSGSPHSKAQLPST

SEQ ID NO: 3010 - protein, 14 aa, synthetic construct
GSGSPHSKAIGKQT

SEQ ID NO: 3011 - protein, 14 aa, synthetic construct
GSGSPHSKAQAIHT

SEQ ID NO: 3012 - protein, 14 aa, synthetic construct
GSGSPHSKAQHGLT

SEQ ID NO: 3013 - protein, 14 aa, synthetic construct
GSGSPHSKAQFMCT

SEQ ID NO: 3014 - protein, 14 aa, synthetic construct
VSGSPHSKAQGQQT

SEQ ID NO: 3015 - protein, 14 aa, synthetic construct
GSGSPHSKAQHLQT

SEQ ID NO: 3016 - protein, 14 aa, synthetic construct
GSGSPHSKTQNHQN

SEQ ID NO: 3017 - protein, 14 aa, synthetic construct
GSGSPHSKAQPART

SEQ ID NO: 3018 - protein, 14 aa, synthetic construct
GSGSPHSKAQSLQT

SEQ ID NO: 3019 - protein, 14 aa, synthetic construct
GSGSPHSKSQSQLT

SEQ ID NO: 3020 - protein, 14 aa, synthetic construct
GSGSPHSKAQDRQS

SEQ ID NO: 3021 - protein, 14 aa, synthetic construct
GSGSPHSKAQMPST

SEQ ID NO: 3022 - protein, 14 aa, synthetic construct
GSGSPHSKAQGSLT

SEQ ID NO: 3023 - protein, 14 aa, synthetic construct
GSGSPHSKSQNQQT

SEQ ID NO: 3024 - protein, 14 aa, synthetic construct
GSGSPHSKAQVPAT

SEQ ID NO: 3025 - protein, 14 aa, synthetic construct
GSGSPHSKAQDKQT

SEQ ID NO: 3026 - protein, 14 aa, synthetic construct
GSGSPHSKAHYQQT

SEQ ID NO: 3027 - protein, 14 aa, synthetic construct
GSGSPHSKAQVPST

SEQ ID NO: 3028 - protein, 14 aa, synthetic construct
GSGSPHSKARGEQT

SEQ ID NO: 3029 - protein, 14 aa, synthetic construct
GSGSPHSKAPGQQT

SEQ ID NO: 3030 - protein, 14 aa, synthetic construct
GSGSPHSKAQSLQI

SEQ ID NO: 3031 - protein, 14 aa, synthetic construct
GSGSPHSKRLEQQT

SEQ ID NO: 3032 - protein, 14 aa, synthetic construct
GSGSPHSKAQNQST

SEQ ID NO: 3033 - protein, 14 aa, synthetic construct
GSGSPHSKAQKVIT

SEQ ID NO: 3034 - protein, 14 aa, synthetic construct
GSGSPHSKAQNNDQ

SEQ ID NO: 3035 - protein, 14 aa, synthetic construct
GSGSPHSKAQSVHT

SEQ ID NO: 3036 - protein, 14 aa, synthetic construct
GSGSPHSKAQPLGT

SEQ ID NO: 3037 - protein, 14 aa, synthetic construct
GSGSPHSKAHNQET

SEQ ID NO: 3038 - protein, 14 aa, synthetic construct
GSGSPHSKAQNLQI

SEQ ID NO: 3039 - protein, 14 aa, synthetic construct
GSGSPHSKAQIQQT

SEQ ID NO: 3040 - protein, 14 aa, synthetic construct
GSGSPHSKAQVRNT

SEQ ID NO: 3041 - protein, 14 aa, synthetic construct
GSGSPHSKAPSNQT

SEQ ID NO: 3042 - protein, 14 aa, synthetic construct
GSGSPHSKAQVGHT

SEQ ID NO: 3043 - protein, 14 aa, synthetic construct
GSGSPHSKAQRDIT

SEQ ID NO: 3044 - protein, 14 aa, synthetic construct
GSGSPHSKAQMPNT

SEQ ID NO: 3045 - protein, 14 aa, synthetic construct
GSGSPHSKARGLQT

SEQ ID NO: 3046 - protein, 14 aa, synthetic construct
GSGSPHSKLQKQQT

SEQ ID NO: 3047 - protein, 14 aa, synthetic construct
GSGSPHSKAPSLQT

SEQ ID NO: 3048 - protein, 14 aa, synthetic construct
GSGSPHSKAQRDQT

SEQ ID NO: 3049 - protein, 14 aa, synthetic construct
GSGSPHSKNRDQQT

SEQ ID NO: 3050 - protein, 14 aa, synthetic construct
GSGSPHSKAQAKGT

SEQ ID NO: 3051 - protein, 14 aa, synthetic construct
GSGSPHSKAQSAHT

SEQ ID NO: 3052 - protein, 14 aa, synthetic construct
GSGSPHSKSQNHQT

SEQ ID NO: 3053 - protein, 14 aa, synthetic construct
RSGSPHSKAQDQQT

SEQ ID NO: 3054 - protein, 14 aa, synthetic construct
GSGSPHSKAQSTMT

SEQ ID NO: 3055 - protein, 14 aa, synthetic construct
GSGSPHSKAQREMT

SEQ ID NO: 3056 - protein, 14 aa, synthetic construct
GSGSPHSKAQYRAT

SEQ ID NO: 3057 - protein, 14 aa, synthetic construct
GSGSPHSKNQWQQT

SEQ ID NO: 3058 - protein, 14 aa, synthetic construct
GSGSPHSKAQRMNT

SEQ ID NO: 3059 - protein, 14 aa, synthetic construct
GSGSPHAKAQNHQT

SEQ ID NO: 3060 - protein, 14 aa, synthetic construct
GSGSPHSKAGDSQT

SEQ ID NO: 3061 - protein, 14 aa, synthetic construct
GSGSPHSKLKSQQT

SEQ ID NO: 3062 - protein, 14 aa, synthetic construct
GSGSPHSKAQKIST

SEQ ID NO: 3063 - protein, 14 aa, synthetic construct
GSGSPHSKAPSMQT

SEQ ID NO: 3064 - protein, 14 aa, synthetic construct
GSGSPHSKASPRQT

SEQ ID NO: 3065 - protein, 14 aa, synthetic construct
GSGSPHSKRMEQQT

SEQ ID NO: 3066 - protein, 14 aa, synthetic construct
GSGSPHSKAQYQNT

SEQ ID NO: 3067 - protein, 14 aa, synthetic construct
RSGSPHSKAQNQQI

SEQ ID NO: 3068 - protein, 14 aa, synthetic construct
GSGSPHTKAQNPPT

SEQ ID NO: 3069 - protein, 14 aa, synthetic construct
GSGSPHTKAQNQQT

SEQ ID NO: 3070 - protein, 14 aa, synthetic construct
ASGSPHSKAQHQQT

SEQ ID NO: 3071 - protein, 14 aa, synthetic construct
ASGSPHSKAINQQT

SEQ ID NO: 3072 - protein, 14 aa, synthetic construct
GSGSPHSKAPNQQH

SEQ ID NO: 3073 - protein, 14 aa, synthetic construct
ASGSPHSKAQNHQT

SEQ ID NO: 3074 - protein, 14 aa, synthetic construct
GSGSPHSKAENRQT

SEQ ID NO: 3075 - protein, 14 aa, synthetic construct
GSGSPHSKVQDQQT

SEQ ID NO: 3076 - protein, 14 aa, synthetic construct
GSGSPHSKAQTQQA

SEQ ID NO: 3077 - protein, 14 aa, synthetic construct
GSGSPHSKAQNQAT

SEQ ID NO: 3078 - protein, 14 aa, synthetic construct
GHDSPHKSGQIRQT

SEQ ID NO: 3079 - protein, 14 aa, synthetic construct
GHDSPHKIGQNQHA

SEQ ID NO: 3080 - protein, 14 aa, synthetic construct
GYDSPHKSGQKQQT

SEQ ID NO: 3081 - protein, 5 aa, synthetic construct
LGSPH

SEQ ID NO: 3082 - protein, 14 aa, synthetic construct
GHDSPHKSGQSVQT

SEQ ID NO: 3083 - protein, 14 aa, synthetic construct
GHESPHKSGRSQQT

SEQ ID NO: 3084 - protein, 14 aa, synthetic construct
GHDSPHKSGQNKLE

SEQ ID NO: 3085 - protein, 14 aa, synthetic construct
GHDSPHKTGQNQQK

SEQ ID NO: 3086 - protein, 14 aa, synthetic construct
GRGSPHKRGQNQQT

SEQ ID NO: 3087 - protein, 14 aa, synthetic construct
GHDNPHKSGQNQQT

SEQ ID NO: 3088 - protein, 14 aa, synthetic construct
GQDSPHKSGQHQQA

SEQ ID NO: 3089 - protein, 14 aa, synthetic construct
GHDSPHKSGQIQHT

SEQ ID NO: 3090 - protein, 14 aa, synthetic construct
GHDSPHKSGPRQQT

SEQ ID NO: 3091 - protein, 14 aa, synthetic construct
GHDSPHKSGHTQQT

SEQ ID NO: 3092 - protein, 14 aa, synthetic construct
GHDSPHKSGQRQHT

SEQ ID NO: 3093 - protein, 14 aa, synthetic construct
GHDSPHKSAQSQQT

SEQ ID NO: 3094 - protein, 14 aa, synthetic construct
GHESPHKSGQNQQS

SEQ ID NO: 3095 - protein, 14 aa, synthetic construct
GHDSPHKSLQNQQT

SEQ ID NO: 3096 - protein, 14 aa, synthetic construct
GHDSPHKSGRNQET

SEQ ID NO: 3097 - protein, 14 aa, synthetic construct
GHDSPHKSGQTQLT

SEQ ID NO: 3098 - protein, 14 aa, synthetic construct
GHDSPHKSEKNQQT

SEQ ID NO: 3099 - protein, 14 aa, synthetic construct
GRDSPHKSGQDQQT

SEQ ID NO: 3100 - protein, 14 aa, synthetic construct
GHDSPHKTGHNQQT

SEQ ID NO: 3101 - protein, 14 aa, synthetic construct
AHDSPHKSGQNQLT

SEQ ID NO: 3102 - protein, 14 aa, synthetic construct
GYDSPHKSGQTQQT

SEQ ID NO: 3103 - protein, 14 aa, synthetic construct
GHESPHKSGQTQQI

SEQ ID NO: 3104 - protein, 14 aa, synthetic construct
GHDSPHKSGQSKQA

SEQ ID NO: 3105 - protein, 14 aa, synthetic construct
GHESPHKSGQNQQT

SEQ ID NO: 3106 - protein, 14 aa, synthetic construct
GHDSPHKTGQNQPP

SEQ ID NO: 3107 - protein, 14 aa, synthetic construct
GHDSPHKSGQSPQT

SEQ ID NO: 3108 - protein, 14 aa, synthetic construct
GNDSPHKSVQNQQT

SEQ ID NO: 3109 - protein, 14 aa, synthetic construct
GHDSPHKSAQNYQT

SEQ ID NO: 3110 - protein, 14 aa, synthetic construct
AHDSPHKIGQNHQT

SEQ ID NO: 3111 - protein, 14 aa, synthetic construct
GHESPHKSAQNRQT

SEQ ID NO: 3112 - protein, 14 aa, synthetic construct
GHDSPHKSGQNQQG

SEQ ID NO: 3113 - protein, 14 aa, synthetic construct
GQDSPHKIGQNQQT

SEQ ID NO: 3114 - protein, 14 aa, synthetic construct
GHDSPHKSGQNHLT

SEQ ID NO: 3115 - protein, 14 aa, synthetic construct
GHDSPHKSGQYQHT

SEQ ID NO: 3116 - protein, 14 aa, synthetic construct
GNDSPHKSVQNHQT

SEQ ID NO: 3117 - protein, 14 aa, synthetic construct
GHDSPHKSGQNQWT

SEQ ID NO: 3118 - protein, 14 aa, synthetic construct
GHDSPHKSVQNQHT

SEQ ID NO: 3119 - protein, 14 aa, synthetic construct
GHDSPHKSGQNQHA

SEQ ID NO: 3120 - protein, 14 aa, synthetic construct
GHDSPHKSGQTRQT

SEQ ID NO: 3121 - protein, 14 aa, synthetic construct
GHDSPHKSGQNLHT

SEQ ID NO: 3122 - protein, 14 aa, synthetic construct
GHDSPHKSGLNQQT

SEQ ID NO: 3123 - protein, 14 aa, synthetic construct
GHDSPHKSAQNQET

SEQ ID NO: 3124 - protein, 14 aa, synthetic construct
GHDSPHKSGQHLQT

SEQ ID NO: 3125 - protein, 14 aa, synthetic construct
GHDSPHKSRLNQPT

SEQ ID NO: 3126 - protein, 14 aa, synthetic construct
GHDSPHKSGQKQQT

SEQ ID NO: 3127 - protein, 14 aa, synthetic construct
GQDSPHKSGQNQDT

SEQ ID NO: 3128 - protein, 14 aa, synthetic construct
GHDSPHKSGRNQQT

SEQ ID NO: 3129 - protein, 14 aa, synthetic construct
GHDSPHKSGQNLLT

SEQ ID NO: 3130 - protein, 14 aa, synthetic construct
GHDSPHKSGQLVIT

SEQ ID NO: 3131 - protein, 14 aa, synthetic construct
GHDSPHKSRQSQQT

SEQ ID NO: 3132 - protein, 14 aa, synthetic construct
GHDSPHKSGRTQET

SEQ ID NO: 3133 - protein, 14 aa, synthetic construct
GHDSPHKSVQTHQT

SEQ ID NO: 3134 - protein, 14 aa, synthetic construct
GHDSPHKSGQNQPA

SEQ ID NO: 3135 - protein, 14 aa, synthetic construct
KHDSPHKSGQNQQT

SEQ ID NO: 3136 - protein, 14 aa, synthetic construct
GHDSPHKSGQTQQT

SEQ ID NO: 3137 - protein, 14 aa, synthetic construct
GPDSPHKIGQNQQS

SEQ ID NO: 3138 - protein, 14 aa, synthetic construct
GHDSPHKSVQNQQT

SEQ ID NO: 3139 - protein, 14 aa, synthetic construct
GHDSPHKSRQDQHT

SEQ ID NO: 3140 - protein, 14 aa, synthetic construct
GPDSPHKSGQKQQT

SEQ ID NO: 3141 - protein, 14 aa, synthetic construct
GHDSPHKSRQSQHT

SEQ ID NO: 3142 - protein, 14 aa, synthetic construct
GHDSPHKSVQNQLT

SEQ ID NO: 3143 - protein, 14 aa, synthetic construct
AHDSPHKSGQNQQT

SEQ ID NO: 3144 - protein, 14 aa, synthetic construct
GQDSPHKSGQNQQS

SEQ ID NO: 3145 - protein, 14 aa, synthetic construct
GHDSPHKSGRNQQI

SEQ ID NO: 3146 - protein, 14 aa, synthetic construct
GYDSPHKSGQYQHT

SEQ ID NO: 3147 - protein, 14 aa, synthetic construct
GHDSPHKSRQNQQT

SEQ ID NO: 3148 - protein, 14 aa, synthetic construct
GHDSPHKSWVRQQT

SEQ ID NO: 3149 - protein, 14 aa, synthetic construct
GHESPHKSGQNQHS

SEQ ID NO: 3150 - protein, 14 aa, synthetic construct
GHDSPHKIGHNQQT

SEQ ID NO: 3151 - protein, 14 aa, synthetic construct
WHDSPHKSGQNQQT

SEQ ID NO: 3152 - protein, 14 aa, synthetic construct
RHDSPHKSGQNQQT

SEQ ID NO: 3153 - protein, 14 aa, synthetic construct
GHDSPHKSNAWQQT

SEQ ID NO: 3154 - protein, 14 aa, synthetic construct
GHDSPHKSGQSVPT

SEQ ID NO: 3155 - protein, 14 aa, synthetic construct
GHESPHKSGQNIQP

SEQ ID NO: 3156 - protein, 14 aa, synthetic construct
GHDSPHKSVQNHLN

SEQ ID NO: 3157 - protein, 14 aa, synthetic construct
GHDSPHKIGLDQQT

SEQ ID NO: 3158 - protein, 14 aa, synthetic construct
GHDSPHKRGPDQQS

SEQ ID NO: 3159 - protein, 14 aa, synthetic construct
GHDSPHKSGESQQT

SEQ ID NO: 3160 - protein, 14 aa, synthetic construct
GHDSPHKHGQNHQT

SEQ ID NO: 3161 - protein, 14 aa, synthetic construct
LHDSPHKSGQNQQT

SEQ ID NO: 3162 - protein, 14 aa, synthetic construct
GHDSPHKSVQNKQT

SEQ ID NO: 3163 - protein, 14 aa, synthetic construct
GQVSPHKSGQNQQT

SEQ ID NO: 3164 - protein, 14 aa, synthetic construct
GHDSPHKSGQRQLT

SEQ ID NO: 3165 - protein, 14 aa, synthetic construct
GHDSPHKIGQNQLT

SEQ ID NO: 3166 - protein, 14 aa, synthetic construct
GHDSPHKSGQIIVT

SEQ ID NO: 3167 - protein, 14 aa, synthetic construct
IHDSPHKSGQNQQT

SEQ ID NO: 3168 - protein, 14 aa, synthetic construct
GYDSPHKSGQKQST

SEQ ID NO: 3169 - protein, 14 aa, synthetic construct
MHDSPHKSGQNQQT

SEQ ID NO: 3170 - protein, 14 aa, synthetic construct
GDDSPHKSVQNQQT

SEQ ID NO: 3171 - protein, 14 aa, synthetic construct
GHDSPHKSVQSHQT

SEQ ID NO: 3172 - protein, 14 aa, synthetic construct
GHDSPHKSGQFVVT

SEQ ID NO: 3173 - protein, 14 aa, synthetic construct
GHDSPHKSRQNLQT

SEQ ID NO: 3174 - protein, 14 aa, synthetic construct
GHNSPHKSGQNQET

SEQ ID NO: 3175 - protein, 14 aa, synthetic construct
GHDSPHKSAQNQQI

SEQ ID NO: 3176 - protein, 14 aa, synthetic construct
NHDSPHKSGQNQQT

SEQ ID NO: 3177 - protein, 14 aa, synthetic construct
GHDSPHKSGQSQPT

SEQ ID NO: 3178 - protein, 14 aa, synthetic construct
GHESPHKSGQNEQT

SEQ ID NO: 3179 - protein, 14 aa, synthetic construct
GHDSPHKSAQNQQT

SEQ ID NO: 3180 - protein, 14 aa, synthetic construct
GHDSPHKSGQNQLT

SEQ ID NO: 3181 - protein, 14 aa, synthetic construct
GHDSPHKSAQNLLT

SEQ ID NO: 3182 - protein, 14 aa, synthetic construct
THDSPHKSGQNQQT

SEQ ID NO: 3183 - protein, 14 aa, synthetic construct
GNGSPHKRGQNQQT

SEQ ID NO: 3184 - protein, 14 aa, synthetic construct
GHDSPHKSGQSLQT

SEQ ID NO: 3185 - protein, 14 aa, synthetic construct
GHDSPHKSAQNHQT

SEQ ID NO: 3186 - protein, 14 aa, synthetic construct
GHDSPHKSGRNRQT

SEQ ID NO: 3187 - protein, 14 aa, synthetic construct
EHDSPHKSGQNQQT

SEQ ID NO: 3188 - protein, 14 aa, synthetic construct
GHDSPHKYGQNEQT

SEQ ID NO: 3189 - protein, 14 aa, synthetic construct
RHDSPHKSGHNQQT

SEQ ID NO: 3190 - protein, 14 aa, synthetic construct
GHDSPHKSQQNQQT

SEQ ID NO: 3191 - protein, 14 aa, synthetic construct
GHDSPHKSGQNQQI

SEQ ID NO: 3192 - protein, 14 aa, synthetic construct
QHDSPHKSGQNQQT

SEQ ID NO: 3193 - protein, 14 aa, synthetic construct
RHDSPHKIVQNQQT

SEQ ID NO: 3194 - protein, 14 aa, synthetic construct
YHDSPHKSGQNQQT

SEQ ID NO: 3195 - protein, 14 aa, synthetic construct
GHDSPHKSVQSKQT

SEQ ID NO: 3196 - protein, 14 aa, synthetic construct
GNDSPHKIGHNQQT

SEQ ID NO: 3197 - protein, 14 aa, synthetic construct
HHDSPHKSGQNQQT

SEQ ID NO: 3198 - protein, 14 aa, synthetic construct
GHDSPHKSGQTQQI

SEQ ID NO: 3199 - protein, 14 aa, synthetic construct
GQDSPHKSGQNPLT

SEQ ID NO: 3200 - protein, 14 aa, synthetic construct
GHDSPHKSGRDQKT

SEQ ID NO: 3201 - protein, 14 aa, synthetic construct
GHDSPHKSVHNQQN

SEQ ID NO: 3202 - protein, 14 aa, synthetic construct
GHDSPHKSGQWKRT

SEQ ID NO: 3203 - protein, 14 aa, synthetic construct
GHDSPHKSGQSQQI

SEQ ID NO: 3204 - protein, 14 aa, synthetic construct
GHDSPHKSRQAQQT

SEQ ID NO: 3205 - protein, 14 aa, synthetic construct
GHDSPHKSVQNHQI

SEQ ID NO: 3206 - protein, 14 aa, synthetic construct
GHDSPHKSKQNQQA

SEQ ID NO: 3207 - protein, 14 aa, synthetic construct
GHDSPHKSAQNQLN

SEQ ID NO: 3208 - protein, 14 aa, synthetic construct
GHDSPHKSGQTQPT

SEQ ID NO: 3209 - protein, 14 aa, synthetic construct
FHDSPHKSGQNQQT

SEQ ID NO: 3210 - protein, 14 aa, synthetic construct
GHDSPHKLWINQQT

SEQ ID NO: 3211 - protein, 14 aa, synthetic construct
GPDSPHKSGQNQQT

SEQ ID NO: 3212 - protein, 14 aa, synthetic construct
GHDSPHKSVQKQLT

SEQ ID NO: 3213 - protein, 14 aa, synthetic construct
GHDSPHKSGRNQLA

SEQ ID NO: 3214 - protein, 14 aa, synthetic construct
VHDSPHKSGQNQQS

SEQ ID NO: 3215 - protein, 14 aa, synthetic construct
GHDSPHKMGRNQQS

SEQ ID NO: 3216 - protein, 14 aa, synthetic construct
GHDSPHKSGISIQT

SEQ ID NO: 3217 - protein, 14 aa, synthetic construct
VHDSPHKSGQNQQT

SEQ ID NO: 3218 - protein, 14 aa, synthetic construct
GHDSPHKSVQNLQT

SEQ ID NO: 3219 - protein, 14 aa, synthetic construct
GHDSPHKMAHNQQT

SEQ ID NO: 3220 - protein, 14 aa, synthetic construct
GHDSPHKHGQNQQN

SEQ ID NO: 3221 - protein, 14 aa, synthetic construct
GHDSPHKSVQSQQS

SEQ ID NO: 3222 - protein, 14 aa, synthetic construct
GHDSPHKSGQTVCT

SEQ ID NO: 3223 - protein, 14 aa, synthetic construct
GQDSPHKSGQYQQI

SEQ ID NO: 3224 - protein, 14 aa, synthetic construct
GHDSPHKSGQQIMT

SEQ ID NO: 3225 - protein, 14 aa, synthetic construct
GHDSPHKSRQNEQS

SEQ ID NO: 3226 - protein, 14 aa, synthetic construct
GHDSPHKSGLNHQT

SEQ ID NO: 3227 - protein, 14 aa, synthetic construct
GYDSPHKSGQNQQT

SEQ ID NO: 3228 - protein, 14 aa, synthetic construct
GHDSPHKSGQNLQT

SEQ ID NO: 3229 - protein, 14 aa, synthetic construct
GHDSPHKSRQDQQT

SEQ ID NO: 3230 - protein, 14 aa, synthetic construct
GDDSPHKSGQKQLT

SEQ ID NO: 3231 - protein, 14 aa, synthetic construct
GDDSPHKSGHNQQT

SEQ ID NO: 3232 - protein, 14 aa, synthetic construct
GHDSPHKSGQMIHT

SEQ ID NO: 3233 - protein, 14 aa, synthetic construct
GHDSPHKSGRNHQS

SEQ ID NO: 3234 - protein, 14 aa, synthetic construct
GHDSPHKSVQNRQT

SEQ ID NO: 3235 - protein, 14 aa, synthetic construct
GHDSPHKSGQKMNT

SEQ ID NO: 3236 - protein, 14 aa, synthetic construct
GHDSPHKSGQSQQN

SEQ ID NO: 3237 - protein, 14 aa, synthetic construct
GHDSPHKSGQYQHA

SEQ ID NO: 3238 - protein, 5 aa, synthetic construct
AGSPH

SEQ ID NO: 3239 - protein, 18 aa, synthetic construct
KTIIGSGSPHSKAQNRHT

SEQ ID NO: 3240 - protein, 18 aa, synthetic construct
KTFPGSGSPHSKVQNQQT

SEQ ID NO: 3241 - protein, 18 aa, synthetic construct
KTEKMSGSPHSKAQNQQT

SEQ ID NO: 3242 - protein, 18 aa, synthetic construct
KTVNGSGSPHSKARDQQT

SEQ ID NO: 3243 - protein, 18 aa, synthetic construct
KTFNGSGSPHSKAPNLQT

SEQ ID NO: 3244 - protein, 18 aa, synthetic construct
KTEKTSGSPHSKAQNQQT

SEQ ID NO: 3245 - protein, 18 aa, synthetic construct
KTINGSGSPHSKAHVRQT

SEQ ID NO: 3246 - protein, 18 aa, synthetic construct
KTVNGSGSPHSKAPNQHT

SEQ ID NO: 3247 - protein, 18 aa, synthetic construct
KTEKISGSPHSKAQNQQT

SEQ ID NO: 3248 - protein, 18 aa, synthetic construct
KTVNGSGSPHSKTQSQQT

SEQ ID NO: 3249 - protein, 18 aa, synthetic construct
TTINGSGSPHSKAQNQQT

SEQ ID NO: 3250 - protein, 18 aa, synthetic construct
KSINESGSPHSKAQNQQI

SEQ ID NO: 3251 - protein, 18 aa, synthetic construct
KTERTSGSPHSKAQNQQT

SEQ ID NO: 3252 - protein, 18 aa, synthetic construct
KTINGSGSPHSKAQPAKT

SEQ ID NO: 3253 - protein, 18 aa, synthetic construct
KTEKSSGSPHSKAQNQQT

SEQ ID NO: 3254 - protein, 18 aa, synthetic construct
KTEKGSGSPHSKAQNQQT

SEQ ID NO: 3255 - protein, 18 aa, synthetic construct
KTINGSGSPHSKSQTQQN

SEQ ID NO: 3256 - protein, 18 aa, synthetic construct
KTERISGSPHSKAQNQQT

SEQ ID NO: 3257 - protein, 18 aa, synthetic construct
KTERASGSPHSKAQNQQT

SEQ ID NO: 3258 - protein, 18 aa, synthetic construct
KELHGSGSPHSKAQNQQT

SEQ ID NO: 3259 - protein, 18 aa, synthetic construct
KAINGSGSPHSKAQNLAT

SEQ ID NO: 3260 - protein, 18 aa, synthetic construct
KTVNGSGSPHSKSQNQLT

SEQ ID NO: 3261 - protein, 18 aa, synthetic construct
KTERNSGSPHSKAQNQQT

SEQ ID NO: 3262 - protein, 18 aa, synthetic construct
KTFNGSGSPHSKAQGQQT

SEQ ID NO: 3263 - protein, 18 aa, synthetic construct
KTERVSGSPHSKAQNQQT

SEQ ID NO: 3264 - protein, 18 aa, synthetic construct
KTINGSGSPHSKALNRQS

SEQ ID NO: 3265 - protein, 18 aa, synthetic construct
KTERLSGSPHSKAQNQQT

SEQ ID NO: 3266 - protein, 18 aa, synthetic construct
KTDNGSGSPHSKAHNQQT

SEQ ID NO: 3267 - protein, 18 aa, synthetic construct
KTFHGSGSPHSKTQNQQT

SEQ ID NO: 3268 - protein, 18 aa, synthetic construct
KTSNGSGSPHSKAQNPPT

SEQ ID NO: 3269 - protein, 18 aa, synthetic construct
ETINGSGSPHSKAQNLQT

SEQ ID NO: 3270 - protein, 18 aa, synthetic construct
NTINGSGSPHSKAQNQQT

SEQ ID NO: 3271 - protein, 18 aa, synthetic construct
KTENMSGSPHSKAQNQQT

SEQ ID NO: 3272 - protein, 18 aa, synthetic construct
KTENVSGSPHSKAQNQQT

SEQ ID NO: 3273 - protein, 18 aa, synthetic construct
KTSSGSGSPHSKAQYQQT

SEQ ID NO: 3274 - protein, 18 aa, synthetic construct
KTEKVSGSPHSKAQNQQT

SEQ ID NO: 3275 - protein, 18 aa, synthetic construct
KAINGSGSPHSKAQDQET

SEQ ID NO: 3276 - protein, 18 aa, synthetic construct
KTCNKSGSPHSKAQNQQT

SEQ ID NO: 3277 - protein, 18 aa, synthetic construct
KTEHLSGSPHSKAQNQQT

SEQ ID NO: 3278 - protein, 18 aa, synthetic construct
KAEMGSGSPHSKAQNQQT

SEQ ID NO: 3279 - protein, 18 aa, synthetic construct
KATNGSGSPHSKAQNHQT

SEQ ID NO: 3280 - protein, 18 aa, synthetic construct
KAIKGSGSPHSKAQDQQT

SEQ ID NO: 3281 - protein, 18 aa, synthetic construct
KTINGSGSPHSKGHWQQT

SEQ ID NO: 3282 - protein, 18 aa, synthetic construct
KTDKTSGSPHSKAQNQQT

SEQ ID NO: 3283 - protein, 18 aa, synthetic construct
KTFKGSGSPHSKAPNQQT

SEQ ID NO: 3284 - protein, 18 aa, synthetic construct
KTVNGSGSPHSKAQNQLI

SEQ ID NO: 3285 - protein, 18 aa, synthetic construct
KTINGSGSPHSKRPEQQT

SEQ ID NO: 3286 - protein, 18 aa, synthetic construct
KTINGSGSPHSKAQRTMT

SEQ ID NO: 3287 - protein, 18 aa, synthetic construct
KTEKASGSPHSKAQNQQT

SEQ ID NO: 3288 - protein, 18 aa, synthetic construct
KSDQGSGSPHSKAQNQQT

SEQ ID NO: 3289 - protein, 18 aa, synthetic construct
KTEITSGSPHSKAQNQQT

SEQ ID NO: 3290 - protein, 18 aa, synthetic construct
KTDKSSGSPHSKAQNQQT

SEQ ID NO: 3291 - protein, 18 aa, synthetic construct
KTIDGSGSPHSKAQNQQH

SEQ ID NO: 3292 - protein, 18 aa, synthetic construct
KNTNGSGSPHSKAQNQQT

SEQ ID NO: 3293 - protein, 18 aa, synthetic construct
KTETHSGSPHSKAQNQQT

SEQ ID NO: 3294 - protein, 18 aa, synthetic construct
KTINGSGSPHSKALHQHT

SEQ ID NO: 3295 - protein, 18 aa, synthetic construct
KTINGSGSPHSKAQHRIT

SEQ ID NO: 3296 - protein, 18 aa, synthetic construct
KTINGSGSPHSKAQYIHT

SEQ ID NO: 3297 - protein, 18 aa, synthetic construct
KTENISGSPHSKAQNQQT

SEQ ID NO: 3298 - protein, 18 aa, synthetic construct
KTINGSGSPHSKAQKFET

SEQ ID NO: 3299 - protein, 18 aa, synthetic construct
KTSNESGSPHSKAQNHQT

SEQ ID NO: 3300 - protein, 18 aa, synthetic construct
KTINGSGSPHSKAQFPST

SEQ ID NO: 3301 - protein, 18 aa, synthetic construct
KTERPSGSPHSKAQNQQT

SEQ ID NO: 3302 - protein, 18 aa, synthetic construct
KTERMSGSPHSKAQNQQT

SEQ ID NO: 3303 - protein, 18 aa, synthetic construct
KTERSSGSPHSKAQNQQT

SEQ ID NO: 3304 - protein, 18 aa, synthetic construct
KTELHSGSPHSKAQNQQT

SEQ ID NO: 3305 - protein, 18 aa, synthetic construct
KTELTSGSPHSKAQNQQT

SEQ ID NO: 3306 - protein, 18 aa, synthetic construct
KTINGSGSPHSKAHNQQR

SEQ ID NO: 3307 - protein, 18 aa, synthetic construct
KTINGSGSPHSKAQAIKT

SEQ ID NO: 3308 - protein, 18 aa, synthetic construct
KTENTSGSPHSKAQNQQT

SEQ ID NO: 3309 - protein, 18 aa, synthetic construct
KTIDGSGSPHSKGQNRQT

SEQ ID NO: 3310 - protein, 18 aa, synthetic construct
KNINGSGSPHSKAQSQQT

SEQ ID NO: 3311 - protein, 18 aa, synthetic construct
KTSNASGSPHSKAQNQLT

SEQ ID NO: 3312 - protein, 18 aa, synthetic construct
KTEARSGSPHSKAQNQQT

SEQ ID NO: 3313 - protein, 18 aa, synthetic construct
KTEKNSGSPHSKAQNQQT

SEQ ID NO: 3314 - protein, 18 aa, synthetic construct
KTANGSGSPHSKAQYQQT

SEQ ID NO: 3315 - protein, 18 aa, synthetic construct
KTVNGSGSPHSKAQYQHT

SEQ ID NO: 3316 - protein, 18 aa, synthetic construct
KTINGSGSPHTKAQNPQS

SEQ ID NO: 3317 - protein, 18 aa, synthetic construct
KTINGSGSPHSKGQNPPT

SEQ ID NO: 3318 - protein, 18 aa, synthetic construct
KTIIGSGSPHSKAQHQLT

SEQ ID NO: 3319 - protein, 18 aa, synthetic construct
KTINGSGSPHSKAQSPPT

SEQ ID NO: 3320 - protein, 18 aa, synthetic construct
NTIYGSGSPHSKAQNQQT

SEQ ID NO: 3321 - protein, 18 aa, synthetic construct
KTINGSGSPHSKAQAKLT

SEQ ID NO: 3322 - protein, 18 aa, synthetic construct
KTDKNSGSPHSKAQNQQT

SEQ ID NO: 3323 - protein, 18 aa, synthetic construct
KTINGSGSPHSKTKSQQT

SEQ ID NO: 3324 - protein, 18 aa, synthetic construct
KTINGSGSPHSKAQDRPT

SEQ ID NO: 3325 - protein, 18 aa, synthetic construct
KTINGSGSPHSKAQSQQL

SEQ ID NO: 3326 - protein, 18 aa, synthetic construct
KTENLSGSPHSKAQNQQT

SEQ ID NO: 3327 - protein, 18 aa, synthetic construct
KTINGSGSPHSKAQAFHT

SEQ ID NO: 3328 - protein, 18 aa, synthetic construct
KTINGSGSPHSKAQKQQD

SEQ ID NO: 3329 - protein, 18 aa, synthetic construct
KTFSGSGSPHSKAQNLQT

SEQ ID NO: 3330 - protein, 18 aa, synthetic construct
KAINGSGSPHSKAQNAQT

SEQ ID NO: 3331 - protein, 18 aa, synthetic construct
KTESWSGSPHSKAQNQQT

SEQ ID NO: 3332 - protein, 18 aa, synthetic construct
KTTNGSGSPHSKAHNQLT

SEQ ID NO: 3333 - protein, 18 aa, synthetic construct
KTEDKSGSPHSKAQNQQT

SEQ ID NO: 3334 - protein, 18 aa, synthetic construct
KTESASGSPHSKAQNQQT

SEQ ID NO: 3335 - protein, 18 aa, synthetic construct
KTNNGSGSPHSKAQNQQY

SEQ ID NO: 3336 - protein, 18 aa, synthetic construct
KTDKMSGSPHSKAQNQQT

SEQ ID NO: 3337 - protein, 18 aa, synthetic construct
KEVHGSGSPHSKAQNQQT

SEQ ID NO: 3338 - protein, 18 aa, synthetic construct
KTINGSGSPHSKAQKLNT

SEQ ID NO: 3339 - protein, 18 aa, synthetic construct
KTTNGSGSPHSKAQYQHT

SEQ ID NO: 3340 - protein, 18 aa, synthetic construct
KTISGSGSPHSKAQYQHT

SEQ ID NO: 3341 - protein, 18 aa, synthetic construct
KTESTSGSPHSKAQNQQT

SEQ ID NO: 3342 - protein, 18 aa, synthetic construct
KTINGSGSPHSKSQNVQT

SEQ ID NO: 3343 - protein, 18 aa, synthetic construct
KSINGSGSPHSKAQAQQT

SEQ ID NO: 3344 - protein, 18 aa, synthetic construct
KTVNGSGSPHSKAQNLQA

SEQ ID NO: 3345 - protein, 18 aa, synthetic construct
KTVRDSGSPHSKAQNQQT

SEQ ID NO: 3346 - protein, 18 aa, synthetic construct
KTFNASGSPHSKAPNQQT

SEQ ID NO: 3347 - protein, 18 aa, synthetic construct
KTDRMSGSPHSKAQNQQT

SEQ ID NO: 3348 - protein, 18 aa, synthetic construct
KTINGSGSPHSKAQTPPT

SEQ ID NO: 3349 - protein, 18 aa, synthetic construct
ETIKGSGSPHSKAQNQQT

SEQ ID NO: 3350 - protein, 18 aa, synthetic construct
KNHIGSGSPHSKAQNQQT

SEQ ID NO: 3351 - protein, 18 aa, synthetic construct
KTINGSGSPHSKAQYQHA

SEQ ID NO: 3352 - protein, 18 aa, synthetic construct
KTINGSGSPHSKAQGQQA

SEQ ID NO: 3353 - protein, 18 aa, synthetic construct
KTFNGSGSPHNKAQNHQT

SEQ ID NO: 3354 - protein, 18 aa, synthetic construct
KESDGSGSPHSKAQNQQT

SEQ ID NO: 3355 - protein, 18 aa, synthetic construct
KTINGSGSPHSKAQPPAT

SEQ ID NO: 3356 - protein, 18 aa, synthetic construct
KTINGSGSPHSKAQERPT

SEQ ID NO: 3357 - protein, 18 aa, synthetic construct
KTIKGSGSPHSKAQDLQT

SEQ ID NO: 3358 - protein, 18 aa, synthetic construct
KTDLKSGSPHSKAQNQQT

SEQ ID NO: 3359 - protein, 18 aa, synthetic construct
KTINGSGSPHSKAQAMHT

SEQ ID NO: 3360 - protein, 18 aa, synthetic construct
KTVPNSGSPHSKAQNQQT

SEQ ID NO: 3361 - protein, 18 aa, synthetic construct
KTVIGSGSPHSKALNQQT

SEQ ID NO: 3362 - protein, 18 aa, synthetic construct
KTINGSGSPHSKAQHPST

SEQ ID NO: 3363 - protein, 18 aa, synthetic construct
KTINGSGSPHSKAPGLQT

SEQ ID NO: 3364 - protein, 18 aa, synthetic construct
KTINGSGSPHSKAQGIRT

SEQ ID NO: 3365 - protein, 18 aa, synthetic construct
KTESHSGSPHSKAQNQQT

SEQ ID NO: 3366 - protein, 18 aa, synthetic construct
KTINGSGSPHSKAQAPAT

SEQ ID NO: 3367 - protein, 18 aa, synthetic construct
KTINGSGSPHSKSQSQQI

SEQ ID NO: 3368 - protein, 18 aa, synthetic construct
KAEHGSGSPHSKAQNQQT

SEQ ID NO: 3369 - protein, 18 aa, synthetic construct
KTEDRSGSPHSKAQNQQT

SEQ ID NO: 3370 - protein, 18 aa, synthetic construct
KNCLGSGSPHSKAQNQQT

SEQ ID NO: 3371 - protein, 18 aa, synthetic construct
KTDRGSGSPHSKAQNQQT

SEQ ID NO: 3372 - protein, 18 aa, synthetic construct
KTINGSGSPHSKAQIPPT

SEQ ID NO: 3373 - protein, 18 aa, synthetic construct
KTVKGSGSPHSKAQDQQT

SEQ ID NO: 3374 - protein, 18 aa, synthetic construct
KNADGSGSPHSKAQNQQT

SEQ ID NO: 3375 - protein, 18 aa, synthetic construct
KTDKVSGSPHSKAQNQQT

SEQ ID NO: 3376 - protein, 18 aa, synthetic construct
KTITGSGSPHSKAQTQLT

SEQ ID NO: 3377 - protein, 18 aa, synthetic construct
KTINGSGSPHSKAQAPST

SEQ ID NO: 3378 - protein, 18 aa, synthetic construct
KNCVGSGSPHSKAQNQQT

SEQ ID NO: 3379 - protein, 18 aa, synthetic construct
KTVKDSGSPHSKAQNQQT

SEQ ID NO: 3380 - protein, 18 aa, synthetic construct
KNALGSGSPHSKAQNQQT

SEQ ID NO: 3381 - protein, 18 aa, synthetic construct
KVINGSGSPHSKGQNQQT

SEQ ID NO: 3382 - protein, 18 aa, synthetic construct
KTSNASGSPHSKAHNQQT

SEQ ID NO: 3383 - protein, 18 aa, synthetic construct
KTINGSGSPHSKAQNTYA

SEQ ID NO: 3384 - protein, 18 aa, synthetic construct
KTINGSGSPHSKSQNQHI

SEQ ID NO: 3385 - protein, 18 aa, synthetic construct
KTEFVSGSPHSKAQNQQT

SEQ ID NO: 3386 - protein, 18 aa, synthetic construct
KTVNGSGSPHSKAQNHLT

SEQ ID NO: 3387 - protein, 18 aa, synthetic construct
KTREISGSPHSKAQNQQT

SEQ ID NO: 3388 - protein, 18 aa, synthetic construct
KTINGSGSPHSKAQIGMT

SEQ ID NO: 3389 - protein, 18 aa, synthetic construct
KTIDGSGSPHSKALNKQT

SEQ ID NO: 3390 - protein, 18 aa, synthetic construct
KQGEGSGSPHSKAQNQQT

SEQ ID NO: 3391 - protein, 18 aa, synthetic construct
KTVNGSGSPHSKAQLQQT

SEQ ID NO: 3392 - protein, 18 aa, synthetic construct
KSINGSGSPHSKTQSQQT

SEQ ID NO: 3393 - protein, 18 aa, synthetic construct
KSEKGSGSPHSKAQNQQT

SEQ ID NO: 3394 - protein, 18 aa, synthetic construct
KNVNGSGSPHSKAQNQQT

SEQ ID NO: 3395 - protein, 18 aa, synthetic construct
KGGEGSGSPHSKAQNQQT

SEQ ID NO: 3396 - protein, 18 aa, synthetic construct
KTINGSGSPHSKAQRMST

SEQ ID NO: 3397 - protein, 18 aa, synthetic construct
KTINGSGSPHSKAQGILT

SEQ ID NO: 3398 - protein, 18 aa, synthetic construct
KEFVGSGSPHSKAQNQQT

SEQ ID NO: 3399 - protein, 18 aa, synthetic construct
KTIIGSGSPHSKAQDRQT

SEQ ID NO: 3400 - protein, 18 aa, synthetic construct
KSDKGSGSPHSKAQNQQT

SEQ ID NO: 3401 - protein, 18 aa, synthetic construct
KTEQVSGSPHSKAQNQQT

SEQ ID NO: 3402 - protein, 18 aa, synthetic construct
KTEHVSGSPHSKAQNQQT

SEQ ID NO: 3403 - protein, 18 aa, synthetic construct
KTINGSGSPHSKARDWQT

SEQ ID NO: 3404 - protein, 18 aa, synthetic construct
KTENASGSPHSKAQNQQT

SEQ ID NO: 3405 - protein, 18 aa, synthetic construct
KEVQGSGSPHSKAQNQQT

SEQ ID NO: 3406 - protein, 18 aa, synthetic construct
KTINGSGSPHSKAQNTHD

SEQ ID NO: 3407 - protein, 18 aa, synthetic construct
KTINGSGSPHSKAPNLQI

SEQ ID NO: 3408 - protein, 18 aa, synthetic construct
KTINGSGSPHSKAQERST

SEQ ID NO: 3409 - protein, 18 aa, synthetic construct
KTSNGSGSPHSKAQNYQT

SEQ ID NO: 3410 - protein, 18 aa, synthetic construct
KTEYISGSPHSKAQNQQT

SEQ ID NO: 3411 - protein, 18 aa, synthetic construct
KTINGSGSPHSKAQRTCT

SEQ ID NO: 3412 - protein, 18 aa, synthetic construct
KTINGSGSPHSKAQIGHT

SEQ ID NO: 3413 - protein, 18 aa, synthetic construct
KNCWGSGSPHSKAQNQQT

SEQ ID NO: 3414 - protein, 18 aa, synthetic construct
KTINGSGSPHSKAQGAIT

SEQ ID NO: 3415 - protein, 18 aa, synthetic construct
KTDVNSGSPHSKAQNQQT

SEQ ID NO: 3416 - protein, 18 aa, synthetic construct
KSDIGSGSPHSKAQNQQT

SEQ ID NO: 3417 - protein, 18 aa, synthetic construct
KTINGSGSPHSKAQVPPT

SEQ ID NO: 3418 - protein, 18 aa, synthetic construct
KTINGSGSPHSKAQVQQI

SEQ ID NO: 3419 - protein, 18 aa, synthetic construct
KTINGSGSPHSKALMRQT

SEQ ID NO: 3420 - protein, 18 aa, synthetic construct
KTINGSGSPHSKAQYSVT

SEQ ID NO: 3421 - protein, 18 aa, synthetic construct
KNSIGSGSPHSKAQNQQT

SEQ ID NO: 3422 - protein, 18 aa, synthetic construct
KTINGSGSPHSKVPNLQT

SEQ ID NO: 3423 - protein, 18 aa, synthetic construct
KAINGSGSPHSKAQSQQI

SEQ ID NO: 3424 - protein, 18 aa, synthetic construct
KTINGSGSPHSKAQAITT

SEQ ID NO: 3425 - protein, 18 aa, synthetic construct
KTINGSGSPHSKAQKTLT

SEQ ID NO: 3426 - protein, 18 aa, synthetic construct
KTVNGSGSPHSKAQNQWT

SEQ ID NO: 3427 - protein, 18 aa, synthetic construct
KTINGSGSPHSKAQLHHT

SEQ ID NO: 3428 - protein, 18 aa, synthetic construct
KTEQTSGSPHSKAQNQQT

SEQ ID NO: 3429 - protein, 18 aa, synthetic construct
KTINGSGSPHSKAQNIII

SEQ ID NO: 3430 - protein, 18 aa, synthetic construct
KNSLGSGSPHSKAQNQQT

SEQ ID NO: 3431 - protein, 18 aa, synthetic construct
KTINGSGSPHSKAQGHHT

SEQ ID NO: 3432 - protein, 18 aa, synthetic construct
KTDRTSGSPHSKAQNQQT

SEQ ID NO: 3433 - protein, 18 aa, synthetic construct
KTINGSGSPHSKAQSKVT

SEQ ID NO: 3434 - protein, 18 aa, synthetic construct
KEVVGSGSPHSKAQNQQT

SEQ ID NO: 3435 - protein, 18 aa, synthetic construct
KTINGSGSPHSKAQLPST

SEQ ID NO: 3436 - protein, 18 aa, synthetic construct
KTINGSGSPHSKAIGKQT

SEQ ID NO: 3437 - protein, 18 aa, synthetic construct
KTEPTSGSPHSKAQNQQT

SEQ ID NO: 3438 - protein, 18 aa, synthetic construct
KTINGSGSPHSKAQAIHT

SEQ ID NO: 3439 - protein, 18 aa, synthetic construct
KTINGSGSPHSKAQHGLT

SEQ ID NO: 3440 - protein, 18 aa, synthetic construct
KSELGSGSPHSKAQNQQT

SEQ ID NO: 3441 - protein, 18 aa, synthetic construct
KTINGSGSPHSKAQFMCT

SEQ ID NO: 3442 - protein, 18 aa, synthetic construct
KTINVSGSPHSKAQGQQT

SEQ ID NO: 3443 - protein, 18 aa, synthetic construct
KTVNGSGSPHSKAQHLQT

SEQ ID NO: 3444 - protein, 18 aa, synthetic construct
KTINGSGSPHSKTQNHQN

SEQ ID NO: 3445 - protein, 18 aa, synthetic construct
KTINGSGSPHSKAQPART

SEQ ID NO: 3446 - protein, 18 aa, synthetic construct
KTVNGSGSPHSKAQSLQT

SEQ ID NO: 3447 - protein, 18 aa, synthetic construct
KTINGSGSPHSKSQSQLT

SEQ ID NO: 3448 - protein, 18 aa, synthetic construct
KTWQNSGSPHSKAQNQQT

SEQ ID NO: 3449 - protein, 18 aa, synthetic construct
KTINGSGSPHSKAQDRQS

SEQ ID NO: 3450 - protein, 18 aa, synthetic construct
KTINGSGSPHSKAQMPST

SEQ ID NO: 3451 - protein, 18 aa, synthetic construct
KTINGSGSPHSKAQGSLT

SEQ ID NO: 3452 - protein, 18 aa, synthetic construct
KTEVTSGSPHSKAQNQQT

SEQ ID NO: 3453 - protein, 18 aa, synthetic construct
KTVIGSGSPHSKSQNQQT

SEQ ID NO: 3454 - protein, 18 aa, synthetic construct
KAVNVSGSPHSKAQNQQT

SEQ ID NO: 3455 - protein, 18 aa, synthetic construct
KTDRNSGSPHSKAQNQQT

SEQ ID NO: 3456 - protein, 18 aa, synthetic construct
KTINGSGSPHSKAQVPAT

SEQ ID NO: 3457 - protein, 18 aa, synthetic construct
KGVLGSGSPHSKAQNQQT

SEQ ID NO: 3458 - protein, 18 aa, synthetic construct
KAINGSGSPHSKAQDKQT

SEQ ID NO: 3459 - protein, 18 aa, synthetic construct
KTSNGSGSPHSKAHYQQT

SEQ ID NO: 3460 - protein, 18 aa, synthetic construct
KTINGSGSPHSKAQVPST

SEQ ID NO: 3461 - protein, 18 aa, synthetic construct
KTELRSGSPHSKAQNQQT

SEQ ID NO: 3462 - protein, 18 aa, synthetic construct
KNINGSGSPHSKAQNHQT

SEQ ID NO: 3463 - protein, 18 aa, synthetic construct
KTINGSGSPHSKARGEQT

SEQ ID NO: 3464 - protein, 18 aa, synthetic construct
KTEDLSGSPHSKAQNQQT

SEQ ID NO: 3465 - protein, 18 aa, synthetic construct
KTINGSGSPHSKAPGQQT

SEQ ID NO: 3466 - protein, 18 aa, synthetic construct
KTINGSGSPHSKAQSLQI

SEQ ID NO: 3467 - protein, 18 aa, synthetic construct
KTINGSGSPHSKRLEQQT

SEQ ID NO: 3468 - protein, 18 aa, synthetic construct
KTERGSGSPHSKAQNQQT

SEQ ID NO: 3469 - protein, 18 aa, synthetic construct
KTVNGSGSPHSKAPNQQT

SEQ ID NO: 3470 - protein, 18 aa, synthetic construct
KTSNGSGSPHSKAQNQST

SEQ ID NO: 3471 - protein, 18 aa, synthetic construct
KTINGSGSPHSKAQKVIT

SEQ ID NO: 3472 - protein, 18 aa, synthetic construct
KTEGISGSPHSKAQNQQT

SEQ ID NO: 3473 - protein, 18 aa, synthetic construct
KTINGSGSPHSKAQNNDQ

SEQ ID NO: 3474 - protein, 18 aa, synthetic construct
KTINGSGSPHSKAQSVHT

SEQ ID NO: 3475 - protein, 18 aa, synthetic construct
KTINGSGSPHSKAQPLGT

SEQ ID NO: 3476 - protein, 18 aa, synthetic construct
KTCNASGSPHSKAQNQQT

SEQ ID NO: 3477 - protein, 18 aa, synthetic construct
KAINGSGSPHSKAHNQET

SEQ ID NO: 3478 - protein, 18 aa, synthetic construct
KTEGLSGSPHSKAQNQQT

SEQ ID NO: 3479 - protein, 18 aa, synthetic construct
KTRDASGSPHSKAQNQQT

SEQ ID NO: 3480 - protein, 18 aa, synthetic construct
KTSNGSGSPHSKAQNLQI

SEQ ID NO: 3481 - protein, 18 aa, synthetic construct
KTGNGSGSPHSKAQIQQT

SEQ ID NO: 3482 - protein, 18 aa, synthetic construct
KTDRSSGSPHSKAQNQQT

SEQ ID NO: 3483 - protein, 18 aa, synthetic construct
KTINGSGSPHSKAQVRNT

SEQ ID NO: 3484 - protein, 18 aa, synthetic construct
KTINGSGSPHSKAPSNQT

SEQ ID NO: 3485 - protein, 18 aa, synthetic construct
KTINGSGSPHSKAQVGHT

SEQ ID NO: 3486 - protein, 18 aa, synthetic construct
KNAIGSGSPHSKAQNQQT

SEQ ID NO: 3487 - protein, 18 aa, synthetic construct
KAENGSGSPHSKAQNQQT

SEQ ID NO: 3488 - protein, 18 aa, synthetic construct
KTINGSGSPHSKAQRDIT

SEQ ID NO: 3489 - protein, 18 aa, synthetic construct
KTINGSGSPHSKAQMPNT

SEQ ID NO: 3490 - protein, 18 aa, synthetic construct
KTVNGSGSPHSKSQNQQT

SEQ ID NO: 3491 - protein, 18 aa, synthetic construct
KTINGSGSPHSKARGLQT

SEQ ID NO: 3492 - protein, 18 aa, synthetic construct
KTELGSGSPHSKAQNQQT

SEQ ID NO: 3493 - protein, 18 aa, synthetic construct
KAETGSGSPHSKAQNQQT

SEQ ID NO: 3494 - protein, 18 aa, synthetic construct
KTINGSGSPHSKLQKQQT

SEQ ID NO: 3495 - protein, 18 aa, synthetic construct
KTINGSGSPHSKAPSLQT

SEQ ID NO: 3496 - protein, 18 aa, synthetic construct
KTINGSGSPHSKAQRDQT

SEQ ID NO: 3497 - protein, 18 aa, synthetic construct
KTDVGSGSPHSKAQNQQT

SEQ ID NO: 3498 - protein, 18 aa, synthetic construct
KTINGSGSPHSKNRDQQT

SEQ ID NO: 3499 - protein, 18 aa, synthetic construct
KSINGSGSPHSKAPNLQT

SEQ ID NO: 3500 - protein, 18 aa, synthetic construct
KTINGSGSPHSKAQAKGT

SEQ ID NO: 3501 - protein, 18 aa, synthetic construct
KTVNGSGSPHSKAQDKQT

SEQ ID NO: 3502 - protein, 18 aa, synthetic construct
KTINGSGSPHSKAQSAHT

SEQ ID NO: 3503 - protein, 18 aa, synthetic construct
KTVPTSGSPHSKAQNQQT

SEQ ID NO: 3504 - protein, 18 aa, synthetic construct
KTIDGSGSPHSKSQNHQT

SEQ ID NO: 3505 - protein, 18 aa, synthetic construct
KTDVKSGSPHSKAQNQQT

SEQ ID NO: 3506 - protein, 18 aa, synthetic construct
KAINRSGSPHSKAQDQQT

SEQ ID NO: 3507 - protein, 18 aa, synthetic construct
KTINGSGSPHSKAQSTMT

SEQ ID NO: 3508 - protein, 18 aa, synthetic construct
KTVNASGSPHSKAQNQLT

SEQ ID NO: 3509 - protein, 18 aa, synthetic construct
KTINGSGSPHSKAQREMT

SEQ ID NO: 3510 - protein, 18 aa, synthetic construct
KTVHGSGSPHSKAQSQQT

SEQ ID NO: 3511 - protein, 18 aa, synthetic construct
KTINGSGSPHSKAQYRAT

SEQ ID NO: 3512 - protein, 18 aa, synthetic construct
KTEPMSGSPHSKAQNQQT

SEQ ID NO: 3513 - protein, 18 aa, synthetic construct
KTINGSGSPHSKNQWQQT

SEQ ID NO: 3514 - protein, 18 aa, synthetic construct
KETAGSGSPHSKAQNQQT

SEQ ID NO: 3515 - protein, 18 aa, synthetic construct
KTINGSGSPHSKAQRMNT

SEQ ID NO: 3516 - protein, 18 aa, synthetic construct
KNNLGSGSPHSKAQNQQT

SEQ ID NO: 3517 - protein, 18 aa, synthetic construct
KTINGSGSPHAKAQNHQT

SEQ ID NO: 3518 - protein, 18 aa, synthetic construct
KTINGSGSPHSKAGDSQT

SEQ ID NO: 3519 - protein, 18 aa, synthetic construct
KTINGSGSPHSKLKSQQT

SEQ ID NO: 3520 - protein, 18 aa, synthetic construct
KTINGSGSPHSKAQKIST

SEQ ID NO: 3521 - protein, 18 aa, synthetic construct
KTEYNSGSPHSKAQNQQT

SEQ ID NO: 3522 - protein, 18 aa, synthetic construct
KTINGSGSPHSKAPSMQT

SEQ ID NO: 3523 - protein, 18 aa, synthetic construct
EAINGSGSPHSKAQNQQT

SEQ ID NO: 3524 - protein, 18 aa, synthetic construct
KTINGSGSPHSKASPRQT

SEQ ID NO: 3525 - protein, 18 aa, synthetic construct
KTINGSGSPHSKRMEQQT

SEQ ID NO: 3526 - protein, 18 aa, synthetic construct
KTINGSGSPHSKAQYQNT

SEQ ID NO: 3527 - protein, 18 aa, synthetic construct
KEINGRGSPHSKAQNQQT

SEQ ID NO: 3528 - protein, 18 aa, synthetic construct
KTVNRNGSPHSKAQNQQT

SEQ ID NO: 3529 - protein, 18 aa, synthetic construct
KTINGPGSPHSKAHNQQT

SEQ ID NO: 3530 - protein, 18 aa, synthetic construct
KTSYGNGSPHSKAQNQQT

SEQ ID NO: 3531 - protein, 18 aa, synthetic construct
KSVNGNGSPHSKAQNQQT

SEQ ID NO: 3532 - protein, 18 aa, synthetic construct
KTINGSGSPHGWVQNQQT

SEQ ID NO: 3533 - protein, 18 aa, synthetic construct
KTINGGGSPHSKAQTQQI

SEQ ID NO: 3534 - protein, 18 aa, synthetic construct
KTVHGNGSPHSKAQNQQT

SEQ ID NO: 3535 - protein, 18 aa, synthetic construct
KTINGGGSPHSKAQNQQC

SEQ ID NO: 3536 - protein, 18 aa, synthetic construct
KTIDGGGSPHSKAQNKQT

SEQ ID NO: 3537 - protein, 18 aa, synthetic construct
KTINGGGSPHSKAQNQLI

SEQ ID NO: 3538 - protein, 18 aa, synthetic construct
KNINGGGSPHSKAQNQQT

SEQ ID NO: 3539 - protein, 18 aa, synthetic construct
KTINGGGSPHSKSQNQLT

SEQ ID NO: 3540 - protein, 18 aa, synthetic construct
KTVNGNGSPHSKAQNKQT

SEQ ID NO: 3541 - protein, 18 aa, synthetic construct
KTVNGNGSPHSKAQNQHT

SEQ ID NO: 3542 - protein, 18 aa, synthetic construct
KTINGGGSPHSKALNQQN

SEQ ID NO: 3543 - protein, 18 aa, synthetic construct
KTINGTGSPHSKAQNHQI

SEQ ID NO: 3544 - protein, 18 aa, synthetic construct
KTIIGGGSPHSKAHNQQT

SEQ ID NO: 3545 - protein, 18 aa, synthetic construct
KTINGNGSPHSKAQNPLT

SEQ ID NO: 3546 - protein, 18 aa, synthetic construct
KSIKGNGSPHSKAQNQQT

SEQ ID NO: 3547 - protein, 18 aa, synthetic construct
KTINGGGSPHSKAQSQQI

SEQ ID NO: 3548 - protein, 18 aa, synthetic construct
KTINGSVSPHGKAQNQLT

SEQ ID NO: 3549 - protein, 18 aa, synthetic construct
KTINGIGSPHSKAQNLGT

SEQ ID NO: 3550 - protein, 18 aa, synthetic construct
KTVNGNGSPHSKAQNHQT

SEQ ID NO: 3551 - protein, 18 aa, synthetic construct
KTSNGGGSPHSKAQNLQT

SEQ ID NO: 3552 - protein, 18 aa, synthetic construct
KTINGGGSPHSKSQNQHT

SEQ ID NO: 3553 - protein, 18 aa, synthetic construct
KTVNGGGSPHSKAQSQQT

SEQ ID NO: 3554 - protein, 18 aa, synthetic construct
KTIPIDGSPHSKAQNQQT

SEQ ID NO: 3555 - protein, 18 aa, synthetic construct
KTINGGGSPHSKAQNPPT

SEQ ID NO: 3556 - protein, 18 aa, synthetic construct
KTINGLGSPHSKSQNQQT

SEQ ID NO: 3557 - protein, 18 aa, synthetic construct
KTINGTGSPHSKAQNQQM

SEQ ID NO: 3558 - protein, 18 aa, synthetic construct
KTIRDAGSPHSKAQNQQT

SEQ ID NO: 3559 - protein, 18 aa, synthetic construct
KTVNGGGSPHSKAQNQQS

SEQ ID NO: 3560 - protein, 18 aa, synthetic construct
KTIQDGGSPHSKAQNQQT

SEQ ID NO: 3561 - protein, 18 aa, synthetic construct
KTISGGGSPHSKAQNQQN

SEQ ID NO: 3562 - protein, 18 aa, synthetic construct
KTINGGGSPHSKAQDKQT

SEQ ID NO: 3563 - protein, 18 aa, synthetic construct
KTIIGGGSPHSKAQNPQT

SEQ ID NO: 3564 - protein, 18 aa, synthetic construct
KTINGTGSPHSKAPNQLT

SEQ ID NO: 3565 - protein, 18 aa, synthetic construct
KTFNGGGSPHSKAQYQQT

SEQ ID NO: 3566 - protein, 18 aa, synthetic construct
KTVNGGGSPHSKAQHQQT

SEQ ID NO: 3567 - protein, 18 aa, synthetic construct
KTIPMEGSPHSKAQNQQT

SEQ ID NO: 3568 - protein, 18 aa, synthetic construct
KTVNGGGSPHSKSQNQQT

SEQ ID NO: 3569 - protein, 18 aa, synthetic construct
KTINGGGSPHSKAQNQMT

SEQ ID NO: 3570 - protein, 18 aa, synthetic construct
KTIRENGSPHSKAQNQQT

SEQ ID NO: 3571 - protein, 18 aa, synthetic construct
KTINGSASPHSKAHSQQT

SEQ ID NO: 3572 - protein, 18 aa, synthetic construct
KTNNGGGSPHSKAQNLQT

SEQ ID NO: 3573 - protein, 18 aa, synthetic construct
KSINGGGSPHSKAQYQQT

SEQ ID NO: 3574 - protein, 18 aa, synthetic construct
KTVNGNGSPHSKSQNQQT

SEQ ID NO: 3575 - protein, 18 aa, synthetic construct
KTLNGNGSPHSKAQNLQT

SEQ ID NO: 3576 - protein, 18 aa, synthetic construct
KTINGSGSSHSKAQNQQT

SEQ ID NO: 3577 - protein, 18 aa, synthetic construct
KTVNGGGSPHSKAQNHQT

SEQ ID NO: 3578 - protein, 18 aa, synthetic construct
KTINGGGSPHSKAQYQHT

SEQ ID NO: 3579 - protein, 18 aa, synthetic construct
KTIPKNGSPHSKAQNQQT

SEQ ID NO: 3580 - protein, 18 aa, synthetic construct
KTINKEGSPHSKAQNQQT

SEQ ID NO: 3581 - protein, 18 aa, synthetic construct
KTVNGGGSPHSKAQNLQT

SEQ ID NO: 3582 - protein, 18 aa, synthetic construct
KTIPAIGSPHSKAQNQQT

SEQ ID NO: 3583 - protein, 18 aa, synthetic construct
KTINGGGSPHSKAQNPQA

SEQ ID NO: 3584 - protein, 18 aa, synthetic construct
KTINGNGSPHSKSQNQHT

SEQ ID NO: 3585 - protein, 18 aa, synthetic construct
KTINGGGSPHSKSQNRQT

SEQ ID NO: 3586 - protein, 18 aa, synthetic construct
KTINGGGSPHSKAQRQQT

SEQ ID NO: 3587 - protein, 18 aa, synthetic construct
KTIIKNGSPHSKAQNQQT

SEQ ID NO: 3588 - protein, 18 aa, synthetic construct
KTINGSGSPHSYHVNQQT

SEQ ID NO: 3589 - protein, 18 aa, synthetic construct
KTERVSGSPHSKAQNQQT

SEQ ID NO: 3590 - protein, 5 aa, synthetic construct
EGSPH

SEQ ID NO: 3591 - protein, 18 aa, synthetic construct
KTFNRSGSPHSKAQNQQI

SEQ ID NO: 3592 - protein, 18 aa, synthetic construct
KTINGSGSPHTKAQNPPT

SEQ ID NO: 3593 - protein, 18 aa, synthetic construct
KSLNGSGSPHTKAQNQQT

SEQ ID NO: 3594 - protein, 18 aa, synthetic construct
KTENKSGSPHSKAQNQQT

SEQ ID NO: 3595 - protein, 18 aa, synthetic construct
KTDKGSGSPHSKAQNQQT

SEQ ID NO: 3596 - protein, 18 aa, synthetic construct
KTSNASGSPHSKAQHQQT

SEQ ID NO: 3597 - protein, 18 aa, synthetic construct
KTINASGSPHSKAINQQT

SEQ ID NO: 3598 - protein, 18 aa, synthetic construct
KTINGSGSPHSKAPNQQH

SEQ ID NO: 3599 - protein, 18 aa, synthetic construct
KTVNASGSPHSKAQNHQT

SEQ ID NO: 3600 - protein, 18 aa, synthetic construct
KTIDGSGSPHSKAENRQT

SEQ ID NO: 3601 - protein, 18 aa, synthetic construct
KTIKGSGSPHSKVQDQQT

SEQ ID NO: 3602 - protein, 18 aa, synthetic construct
KAINGSGSPHSKAQTQQA

SEQ ID NO: 3603 - protein, 18 aa, synthetic construct
KTEAKSGSPHSKAQNQQT

SEQ ID NO: 3604 - protein, 18 aa, synthetic construct
KTIPGSGSPHSKAQNLQT

SEQ ID NO: 3605 - protein, 18 aa, synthetic construct
KTIHGSGSPHSKAQNQAT

SEQ ID NO: 3606 - protein, 18 aa, synthetic construct
KAINGHDSPHKSGQIRQT

SEQ ID NO: 3607 - protein, 18 aa, synthetic construct
KTINGHDSPHKIGQNQHA

SEQ ID NO: 3608 - protein, 18 aa, synthetic construct
KAINGYDSPHKSGQKQQT

SEQ ID NO: 3609 - protein, 18 aa, synthetic construct
KTESGHDSPHKSGQNQQT

SEQ ID NO: 3610 - protein, 18 aa, synthetic construct
KTINGHDSPHKSGQSVQT

SEQ ID NO: 3611 - protein, 18 aa, synthetic construct
TTINGHDSPHKSGQNQQT

SEQ ID NO: 3612 - protein, 18 aa, synthetic construct
KTINGHESPHKSGRSQQT

SEQ ID NO: 3613 - protein, 18 aa, synthetic construct
KTINGHDSPHKSGQNKLE

SEQ ID NO: 3614 - protein, 18 aa, synthetic construct
KTINGHDSPHKTGQNQQK

SEQ ID NO: 3615 - protein, 18 aa, synthetic construct
KAINGHDNPHKSGQNQQT

SEQ ID NO: 3616 - protein, 18 aa, synthetic construct
KTINGQDSPHKSGQHQQA

SEQ ID NO: 3617 - protein, 18 aa, synthetic construct
KSINGHDSPHKSGQIQHT

SEQ ID NO: 3618 - protein, 18 aa, synthetic construct
KAINGHDSPHKSGPRQQT

SEQ ID NO: 3619 - protein, 18 aa, synthetic construct
KTVNGHDSPHKSGHTQQT

SEQ ID NO: 3620 - protein, 18 aa, synthetic construct
KSINGHDSPHKSGQRQHT

SEQ ID NO: 3621 - protein, 18 aa, synthetic construct
KAINGHDSPHKSAQSQQT

SEQ ID NO: 3622 - protein, 18 aa, synthetic construct
KSIYGHESPHKSGQNQQS

SEQ ID NO: 3623 - protein, 18 aa, synthetic construct
KTVNGHDSPHKSLQNQQT

SEQ ID NO: 3624 - protein, 18 aa, synthetic construct
KTSNGYDSPHKSGQKQQT

SEQ ID NO: 3625 - protein, 18 aa, synthetic construct
KTVNGHDSPHKSGRNQET

SEQ ID NO: 3626 - protein, 18 aa, synthetic construct
KTTNGHDSPHKSGQTQLT

SEQ ID NO: 3627 - protein, 18 aa, synthetic construct
KAINGHDSPHKSEKNQQT

SEQ ID NO: 3628 - protein, 18 aa, synthetic construct
KIINGRDSPHKSGQDQQT

SEQ ID NO: 3629 - protein, 18 aa, synthetic construct
KTISGHDSPHKTGHNQQT

SEQ ID NO: 3630 - protein, 18 aa, synthetic construct
KTVNAHDSPHKSGQNQLT

SEQ ID NO: 3631 - protein, 18 aa, synthetic construct
KSINGYDSPHKSGQTQQT

SEQ ID NO: 3632 - protein, 18 aa, synthetic construct
KTINGHESPHKSGQTQQI

SEQ ID NO: 3633 - protein, 18 aa, synthetic construct
KTINGHDSPHKSGQSKQA

SEQ ID NO: 3634 - protein, 18 aa, synthetic construct
KAIIGHESPHKSGQNQQT

SEQ ID NO: 3635 - protein, 18 aa, synthetic construct
KTINGHDSPHKTGQNQPP

SEQ ID NO: 3636 - protein, 18 aa, synthetic construct
KAINGHDSPHKSGQSPQT

SEQ ID NO: 3637 - protein, 18 aa, synthetic construct
KTIKGNDSPHKSVQNQQT

SEQ ID NO: 3638 - protein, 18 aa, synthetic construct
KTEFGHDSPHKSGQNQQT

SEQ ID NO: 3639 - protein, 18 aa, synthetic construct
KTINGHDSPHKSAQNYQT

SEQ ID NO: 3640 - protein, 18 aa, synthetic construct
KTINAHDSPHKIGQNHQT

SEQ ID NO: 3641 - protein, 18 aa, synthetic construct
KTINGHESPHKSAQNRQT

SEQ ID NO: 3642 - protein, 18 aa, synthetic construct
KTTNGHDSPHKSGQNQQG

SEQ ID NO: 3643 - protein, 18 aa, synthetic construct
KTIKGQDSPHKIGQNQQT

SEQ ID NO: 3644 - protein, 18 aa, synthetic construct
KTVNGHDSPHKSGQNHLT

SEQ ID NO: 3645 - protein, 18 aa, synthetic construct
KSINGHDSPHKSGQYQHT

SEQ ID NO: 3646 - protein, 18 aa, synthetic construct
KTINGNDSPHKSVQNHQT

SEQ ID NO: 3647 - protein, 18 aa, synthetic construct
KTITGHDSPHKSGQNQWT

SEQ ID NO: 3648 - protein, 18 aa, synthetic construct
KTNNGHDSPHKSVQNQHT

SEQ ID NO: 3649 - protein, 18 aa, synthetic construct
KTIDGHDSPHKSGQNQHA

SEQ ID NO: 3650 - protein, 18 aa, synthetic construct
KTVNGHDSPHKSGQTRQT

SEQ ID NO: 3651 - protein, 18 aa, synthetic construct
KTVNGHDSPHKSGQNLHT

SEQ ID NO: 3652 - protein, 18 aa, synthetic construct
KAISGHDSPHKSGLNQQT

SEQ ID NO: 3653 - protein, 18 aa, synthetic construct
KAINGHDSPHKSAQNQET

SEQ ID NO: 3654 - protein, 18 aa, synthetic construct
KTITGHDSPHKSGQHLQT

SEQ ID NO: 3655 - protein, 18 aa, synthetic construct
KTINGHDSPHKSRLNQPT

SEQ ID NO: 3656 - protein, 18 aa, synthetic construct
KTVDGHDSPHKSGQKQQT

SEQ ID NO: 3657 - protein, 18 aa, synthetic construct
KTINGQDSPHKSGQNQDT

SEQ ID NO: 3658 - protein, 18 aa, synthetic construct
KTIEGHDSPHKSGRNQQT

SEQ ID NO: 3659 - protein, 18 aa, synthetic construct
KTTNGHDSPHKSGQNLLT

SEQ ID NO: 3660 - protein, 18 aa, synthetic construct
KTINGHDSPHKSGQLVIT

SEQ ID NO: 3661 - protein, 18 aa, synthetic construct
KTVNGHDSPHKSRQSQQT

SEQ ID NO: 3662 - protein, 18 aa, synthetic construct
KTINGHDSPHKSGRTQET

SEQ ID NO: 3663 - protein, 18 aa, synthetic construct
KTINGHDSPHKSVQTHQT

SEQ ID NO: 3664 - protein, 18 aa, synthetic construct
KTSNGHDSPHKSGQNQPA

SEQ ID NO: 3665 - protein, 18 aa, synthetic construct
KTEGKHDSPHKSGQNQQT

SEQ ID NO: 3666 - protein, 18 aa, synthetic construct
KVINGHDSPHKSGQTQQT

SEQ ID NO: 3667 - protein, 18 aa, synthetic construct
KTINGPDSPHKIGQNQQS

SEQ ID NO: 3668 - protein, 18 aa, synthetic construct
KAVNGHDSPHKSVQNQQT

SEQ ID NO: 3669 - protein, 18 aa, synthetic construct
KTINGHDSPHKSRQDQHT

SEQ ID NO: 3670 - protein, 18 aa, synthetic construct
KAINGPDSPHKSGQKQQT

SEQ ID NO: 3671 - protein, 18 aa, synthetic construct
KTINGHDSPHKSRQSQHT

SEQ ID NO: 3672 - protein, 18 aa, synthetic construct
KTIYGHDSPHKSVQNQLT

SEQ ID NO: 3673 - protein, 18 aa, synthetic construct
KTVNGHDSPHKSGQNLLT

SEQ ID NO: 3674 - protein, 18 aa, synthetic construct
KTESAHDSPHKSGQNQQT

SEQ ID NO: 3675 - protein, 18 aa, synthetic construct
KTTNGQDSPHKSGQNQQS

SEQ ID NO: 3676 - protein, 18 aa, synthetic construct
KTIDGHDSPHKSGRNQQI

SEQ ID NO: 3677 - protein, 18 aa, synthetic construct
KTINGYDSPHKSGQYQHT

SEQ ID NO: 3678 - protein, 18 aa, synthetic construct
KTDNGHDSPHKSRQNQQT

SEQ ID NO: 3679 - protein, 18 aa, synthetic construct
KTINGHDSPHKSWVRQQT

SEQ ID NO: 3680 - protein, 18 aa, synthetic construct
KTINGHESPHKSGQNQHS

SEQ ID NO: 3681 - protein, 18 aa, synthetic construct
KTVNGHDSPHKIGHNQQT

SEQ ID NO: 3682 - protein, 18 aa, synthetic construct
KTCNGHDSPHKSGRNQQT

SEQ ID NO: 3683 - protein, 18 aa, synthetic construct
KNVVGHDSPHKSGQNQQT

SEQ ID NO: 3684 - protein, 18 aa, synthetic construct
KTELWHDSPHKSGQNQQT

SEQ ID NO: 3685 - protein, 18 aa, synthetic construct
KTELRHDSPHKSGQNQQT

SEQ ID NO: 3686 - protein, 18 aa, synthetic construct
KTINGHDSPHKSNAWQQT

SEQ ID NO: 3687 - protein, 18 aa, synthetic construct
KTDAGHDSPHKSGQNQQT

SEQ ID NO: 3688 - protein, 18 aa, synthetic construct
KTEVGHDSPHKSGQNQQT

SEQ ID NO: 3689 - protein, 18 aa, synthetic construct
KTESRHDSPHKSGQNQQT

SEQ ID NO: 3690 - protein, 18 aa, synthetic construct
KSELGHDSPHKSGQNQQT

SEQ ID NO: 3691 - protein, 18 aa, synthetic construct
KTINGHDSPHKSGQSVPT

SEQ ID NO: 3692 - protein, 18 aa, synthetic construct
KTINGHESPHKSGQNIQP

SEQ ID NO: 3693 - protein, 18 aa, synthetic construct
KTEMKHDSPHKSGQNQQT

SEQ ID NO: 3694 - protein, 18 aa, synthetic construct
KTINGHDSPHKSVQNHLN

SEQ ID NO: 3695 - protein, 18 aa, synthetic construct
KTINGHDSPHKIGLDQQT

SEQ ID NO: 3696 - protein, 18 aa, synthetic construct
KTINGHDSPHKRGPDQQS

SEQ ID NO: 3697 - protein, 18 aa, synthetic construct
KTIKGHDSPHKSGESQQT

SEQ ID NO: 3698 - protein, 18 aa, synthetic construct
KTEGWHDSPHKSGQNQQT

SEQ ID NO: 3699 - protein, 18 aa, synthetic construct
KTINGHDSPHKHGQNHQT

SEQ ID NO: 3700 - protein, 18 aa, synthetic construct
KTEQLHDSPHKSGQNQQT

SEQ ID NO: 3701 - protein, 18 aa, synthetic construct
KTIIGHDSPHKSGQYQHT

SEQ ID NO: 3702 - protein, 18 aa, synthetic construct
KTSNGHDSPHKSVQNKQT

SEQ ID NO: 3703 - protein, 18 aa, synthetic construct
KIVNGQVSPHKSGQNQQT

SEQ ID NO: 3704 - protein, 18 aa, synthetic construct
KTVNGHDSPHKSGQRQLT

SEQ ID NO: 3705 - protein, 18 aa, synthetic construct
KTVNGHDSPHKIGQNQLT

SEQ ID NO: 3706 - protein, 18 aa, synthetic construct
KTINGHDSPHKSGQIIVT

SEQ ID NO: 3707 - protein, 18 aa, synthetic construct
KTEKIHDSPHKSGQNQQT

SEQ ID NO: 3708 - protein, 18 aa, synthetic construct
KTENAHDSPHKSGQNQQT

SEQ ID NO: 3709 - protein, 18 aa, synthetic construct
KIGNGHESPHKSGQNQQT

SEQ ID NO: 3710 - protein, 18 aa, synthetic construct
KEVMGHDSPHKSGQNQQT

SEQ ID NO: 3711 - protein, 18 aa, synthetic construct
KTEVKHDSPHKSGQNQQT

SEQ ID NO: 3712 - protein, 18 aa, synthetic construct
KTINGYDSPHKSGQKQST

SEQ ID NO: 3713 - protein, 18 aa, synthetic construct
KYQVGHDSPHKSGQNQQT

SEQ ID NO: 3714 - protein, 18 aa, synthetic construct
KTEAMHDSPHKSGQNQQT

SEQ ID NO: 3715 - protein, 18 aa, synthetic construct
KTIKGDDSPHKSVQNQQT

SEQ ID NO: 3716 - protein, 18 aa, synthetic construct
KTINGHDSPHKSVQSHQT

SEQ ID NO: 3717 - protein, 18 aa, synthetic construct
KTINGHDSPHKSGQFVVT

SEQ ID NO: 3718 - protein, 18 aa, synthetic construct
KTVNGHDSPHKSRQNLQT

SEQ ID NO: 3719 - protein, 18 aa, synthetic construct
KATNGHNSPHKSGQNQET

SEQ ID NO: 3720 - protein, 18 aa, synthetic construct
KAINGHDSPHKSAQNQQI

SEQ ID NO: 3721 - protein, 18 aa, synthetic construct
KTEHGHDSPHKSGQNQQT

SEQ ID NO: 3722 - protein, 18 aa, synthetic construct
KTVENHDSPHKSGQNQQT

SEQ ID NO: 3723 - protein, 18 aa, synthetic construct
KTIYGHDSPHKSGQSQPT

SEQ ID NO: 3724 - protein, 18 aa, synthetic construct
KTISGHESPHKSGQNEQT

SEQ ID NO: 3725 - protein, 18 aa, synthetic construct
KAIIGHDSPHKSAQNQQT

SEQ ID NO: 3726 - protein, 18 aa, synthetic construct
KAIDGHDSPHKSGQNQLT

SEQ ID NO: 3727 - protein, 18 aa, synthetic construct
KTIMGHDSPHKSVQNQQT

SEQ ID NO: 3728 - protein, 18 aa, synthetic construct
KEVGGHDSPHKSGQNQQT

SEQ ID NO: 3729 - protein, 18 aa, synthetic construct
KTINGHDSPHKSAQNLLT

SEQ ID NO: 3730 - protein, 18 aa, synthetic construct
KTEFTHDSPHKSGQNQQT

SEQ ID NO: 3731 - protein, 18 aa, synthetic construct
KSEMGHDSPHKSGQNQQT

SEQ ID NO: 3732 - protein, 18 aa, synthetic construct
KAQQGHDSPHKSGQNQQT

SEQ ID NO: 3733 - protein, 18 aa, synthetic construct
KTEVMHDSPHKSGQNQQT

SEQ ID NO: 3734 - protein, 18 aa, synthetic construct
KAINGHDSPHKSGQSLQT

SEQ ID NO: 3735 - protein, 18 aa, synthetic construct
KCGEGHDSPHKSGQNQQT

SEQ ID NO: 3736 - protein, 18 aa, synthetic construct
KTVNGHDSPHKSAQNHQT

SEQ ID NO: 3737 - protein, 18 aa, synthetic construct
KTVNGHDSPHKSGQTQLT

SEQ ID NO: 3738 - protein, 18 aa, synthetic construct
KTNNGHDSPHKSGRNRQT

SEQ ID NO: 3739 - protein, 18 aa, synthetic construct
KTCNEHDSPHKSGQNQQT

SEQ ID NO: 3740 - protein, 18 aa, synthetic construct
KTINGHDSPHKYGQNEQT

SEQ ID NO: 3741 - protein, 18 aa, synthetic construct
KASNRHDSPHKSGHNQQT

SEQ ID NO: 3742 - protein, 18 aa, synthetic construct
KTETKHDSPHKSGQNQQT

SEQ ID NO: 3743 - protein, 18 aa, synthetic construct
KSINGHDSPHKSQQNQQT

SEQ ID NO: 3744 - protein, 18 aa, synthetic construct
KTIGGHDSPHKSGQNQQI

SEQ ID NO: 3745 - protein, 18 aa, synthetic construct
KTDPQHDSPHKSGQNQQT

SEQ ID NO: 3746 - protein, 18 aa, synthetic construct
KTINRHDSPHKIVQNQQT

SEQ ID NO: 3747 - protein, 18 aa, synthetic construct
KTEQYHDSPHKSGQNQQT

SEQ ID NO: 3748 - protein, 18 aa, synthetic construct
KTINGHDSPHKSVQSKQT

SEQ ID NO: 3749 - protein, 18 aa, synthetic construct
KELVGHDSPHKSGQNQQT

SEQ ID NO: 3750 - protein, 18 aa, synthetic construct
KTENRHDSPHKSGQNQQT

SEQ ID NO: 3751 - protein, 18 aa, synthetic construct
KELMGHDSPHKSGQNQQT

SEQ ID NO: 3752 - protein, 18 aa, synthetic construct
KTINGNDSPHKIGHNQQT

SEQ ID NO: 3753 - protein, 18 aa, synthetic construct
KTEGHHDSPHKSGQNQQT

SEQ ID NO: 3754 - protein, 18 aa, synthetic construct
KTEGYHDSPHKSGQNQQT

SEQ ID NO: 3755 - protein, 18 aa, synthetic construct
KTVNGHDSPHKSGQTQQI

SEQ ID NO: 3756 - protein, 18 aa, synthetic construct
KTINGQDSPHKSGQNPLT

SEQ ID NO: 3757 - protein, 18 aa, synthetic construct
KTINGHDSPHKSGRDQKT

SEQ ID NO: 3758 - protein, 18 aa, synthetic construct
KTINGHDSPHKSVHNQQN

SEQ ID NO: 3759 - protein, 18 aa, synthetic construct
KTINGHDSPHKSGQWKRT

SEQ ID NO: 3760 - protein, 18 aa, synthetic construct
KNEIGHDSPHKSGQNQQT

SEQ ID NO: 3761 - protein, 18 aa, synthetic construct
KAINGHDSPHKSGQSQQI

SEQ ID NO: 3762 - protein, 18 aa, synthetic construct
KIINGHDSPHKSRQAQQT

SEQ ID NO: 3763 - protein, 18 aa, synthetic construct
KTPNGHDSPHKSGQNQQI

SEQ ID NO: 3764 - protein, 18 aa, synthetic construct
KITNGHDSPHKSGQTQQT

SEQ ID NO: 3765 - protein, 18 aa, synthetic construct
KTINGHDSPHKSVQNHQI

SEQ ID NO: 3766 - protein, 18 aa, synthetic construct
KTINGHDSPHKSKQNQQA

SEQ ID NO: 3767 - protein, 18 aa, synthetic construct
KTINGHDSPHKSAQNQLN

SEQ ID NO: 3768 - protein, 18 aa, synthetic construct
KTDITHDSPHKSGQNQQT

SEQ ID NO: 3769 - protein, 18 aa, synthetic construct
KTVNGHDSPHKSGQTQPT

SEQ ID NO: 3770 - protein, 18 aa, synthetic construct
KTEKFHDSPHKSGQNQQT

SEQ ID NO: 3771 - protein, 18 aa, synthetic construct
KTDQGHDSPHKSGQNQQT

SEQ ID NO: 3772 - protein, 18 aa, synthetic construct
KTINGHDSPHKLWINQQT

SEQ ID NO: 3773 - protein, 18 aa, synthetic construct
KGINGPDSPHKSGQNQQT

SEQ ID NO: 3774 - protein, 18 aa, synthetic construct
KSEIGHDSPHKSGQNQQT

SEQ ID NO: 3775 - protein, 18 aa, synthetic construct
KTINGHDSPHKSVQKQLT

SEQ ID NO: 3776 - protein, 18 aa, synthetic construct
KTVNGHDSPHKSGRNQLA

SEQ ID NO: 3777 - protein, 18 aa, synthetic construct
KTNNVHDSPHKSGQNQQS

SEQ ID NO: 3778 - protein, 18 aa, synthetic construct
KSEKGHDSPHKSGQNQQT

SEQ ID NO: 3779 - protein, 18 aa, synthetic construct
KWSAGHDSPHKSGQNQQT

SEQ ID NO: 3780 - protein, 18 aa, synthetic construct
KELAGHDSPHKSGQNQQT

SEQ ID NO: 3781 - protein, 18 aa, synthetic construct
KTINGHDSPHKMGRNQQS

SEQ ID NO: 3782 - protein, 18 aa, synthetic construct
KTDQAHDSPHKSGQNQQT

SEQ ID NO: 3783 - protein, 18 aa, synthetic construct
KTETQHDSPHKSGQNQQT

SEQ ID NO: 3784 - protein, 18 aa, synthetic construct
KTEMTHDSPHKSGQNQQT

SEQ ID NO: 3785 - protein, 18 aa, synthetic construct
KTINGHDSPHKSGISIQT

SEQ ID NO: 3786 - protein, 18 aa, synthetic construct
KTDAVHDSPHKSGQNQQT

SEQ ID NO: 3787 - protein, 18 aa, synthetic construct
KTSNGHDSPHKSVQNLQT

SEQ ID NO: 3788 - protein, 18 aa, synthetic construct
KTEKYHDSPHKSGQNQQT

SEQ ID NO: 3789 - protein, 18 aa, synthetic construct
KQTQGHDSPHKSGQNQQT

SEQ ID NO: 3790 - protein, 18 aa, synthetic construct
KTINGHDSPHKMAHNQQT

SEQ ID NO: 3791 - protein, 18 aa, synthetic construct
KTINGHDSPHKHGQNQQN

SEQ ID NO: 3792 - protein, 18 aa, synthetic construct
KGADGHDSPHKSGQNQQT

SEQ ID NO: 3793 - protein, 18 aa, synthetic construct
KVGEGHDSPHKSGQNQQT

SEQ ID NO: 3794 - protein, 18 aa, synthetic construct
KANEGHDSPHKSGQNQQT

SEQ ID NO: 3795 - protein, 18 aa, synthetic construct
KTDTMHDSPHKSGQNQQT

SEQ ID NO: 3796 - protein, 18 aa, synthetic construct
KTINGHDSPHKSVQSQQS

SEQ ID NO: 3797 - protein, 18 aa, synthetic construct
KTCIAHDSPHKSGQNQQT

SEQ ID NO: 3798 - protein, 18 aa, synthetic construct
KTINGHDSPHKSGQTVCT

SEQ ID NO: 3799 - protein, 18 aa, synthetic construct
KELRGHDSPHKSGQNQQT

SEQ ID NO: 3800 - protein, 18 aa, synthetic construct
KCQIGHDSPHKSGQNQQT

SEQ ID NO: 3801 - protein, 18 aa, synthetic construct
KGVMGHDSPHKSGQNQQT

SEQ ID NO: 3802 - protein, 18 aa, synthetic construct
KACDGHDSPHKSGQNQQT

SEQ ID NO: 3803 - protein, 18 aa, synthetic construct
KTINGQDSPHKSGQYQQI

SEQ ID NO: 3804 - protein, 18 aa, synthetic construct
KTINGHDSPHKSGQQIMT

SEQ ID NO: 3805 - protein, 18 aa, synthetic construct
KTINGHDSPHKSRQNEQS

SEQ ID NO: 3806 - protein, 18 aa, synthetic construct
KASNGHDSPHKSGLNHQT

SEQ ID NO: 3807 - protein, 18 aa, synthetic construct
KTVNGHDSPHKSGQSQPT

SEQ ID NO: 3808 - protein, 18 aa, synthetic construct
KNELGHDSPHKSGQNQQT

SEQ ID NO: 3809 - protein, 18 aa, synthetic construct
KTETFHDSPHKSGQNQQT

SEQ ID NO: 3810 - protein, 18 aa, synthetic construct
KAAEGHDSPHKSGQNQQT

SEQ ID NO: 3811 - protein, 18 aa, synthetic construct
KGQNGHDSPHKSGQNQQT

SEQ ID NO: 3812 - protein, 18 aa, synthetic construct
KNEFGHDSPHKSGQNQQT

SEQ ID NO: 3813 - protein, 18 aa, synthetic construct
KTSIGYDSPHKSGQNQQT

SEQ ID NO: 3814 - protein, 18 aa, synthetic construct
KTDNGHDSPHKSGQNLQT

SEQ ID NO: 3815 - protein, 18 aa, synthetic construct
KTEGQHDSPHKSGQNQQT

SEQ ID NO: 3816 - protein, 18 aa, synthetic construct
KTITGHDSPHKSRQDQQT

SEQ ID NO: 3817 - protein, 18 aa, synthetic construct
KAEHGHDSPHKSGQNQQT

SEQ ID NO: 3818 - protein, 18 aa, synthetic construct
KTINGDDSPHKSGQKQLT

SEQ ID NO: 3819 - protein, 18 aa, synthetic construct
KCDQGHDSPHKSGQNQQT

SEQ ID NO: 3820 - protein, 18 aa, synthetic construct
KEILGHDSPHKSGQNQQT

SEQ ID NO: 3821 - protein, 18 aa, synthetic construct
KTERNHDSPHKSGQNQQT

SEQ ID NO: 3822 - protein, 18 aa, synthetic construct
KAINGDDSPHKSGHNQQT

SEQ ID NO: 3823 - protein, 18 aa, synthetic construct
KTSNGHNSPHKSGQNQET

SEQ ID NO: 3824 - protein, 18 aa, synthetic construct
KTINGHDSPHKSGQMIHT

SEQ ID NO: 3825 - protein, 18 aa, synthetic construct
KNAIGHDSPHKSGQNQQT

SEQ ID NO: 3826 - protein, 18 aa, synthetic construct
KTDKFHDSPHKSGQNQQT

SEQ ID NO: 3827 - protein, 18 aa, synthetic construct
KTEGFHDSPHKSGQNQQT

SEQ ID NO: 3828 - protein, 18 aa, synthetic construct
KVINGHDSPHKSGRNHQS

SEQ ID NO: 3829 - protein, 18 aa, synthetic construct
KTITGHDSPHKSVQNRQT

SEQ ID NO: 3830 - protein, 18 aa, synthetic construct
KTPDMHDSPHKSGQNQQT

SEQ ID NO: 3831 - protein, 18 aa, synthetic construct
KTINGHDSPHKSGQKMNT

SEQ ID NO: 3832 - protein, 18 aa, synthetic construct
KTELQHDSPHKSGQNQQT

SEQ ID NO: 3833 - protein, 18 aa, synthetic construct
KTIHGHDSPHKSGQSQQN

SEQ ID NO: 3834 - protein, 18 aa, synthetic construct
KTEIGHDSPHKSGQNQQT

SEQ ID NO: 3835 - protein, 18 aa, synthetic construct
KTINGHDSPHKSGQYQHA

SEQ ID NO: 3836 - protein, 18 aa, synthetic construct
KTELYHDSPHKSGQNQQT

SEQ ID NO: 3837 - protein, 18 aa, synthetic construct
KTINGRGSPHKRGQNQQT

SEQ ID NO: 3838 - protein, 18 aa, synthetic construct
KTINGHGSPHSKAQNPQT

SEQ ID NO: 3839 - protein, 18 aa, synthetic construct
KTFNGSASPHSKALNQQT

SEQ ID NO: 3840 - protein, 18 aa, synthetic construct
KTINGCGSPHASGQNQQT

SEQ ID NO: 3841 - protein, 18 aa, synthetic construct
KTINGNGSPHSKAQNHQA

SEQ ID NO: 3842 - protein, 18 aa, synthetic construct
KTINGMGSPHSKTQNQQT

SEQ ID NO: 3843 - protein, 18 aa, synthetic construct
KTVNGTGSPHSKAQNQLT

SEQ ID NO: 3844 - protein, 18 aa, synthetic construct
KTIHGNGSPHSKAQNQET

SEQ ID NO: 3845 - protein, 18 aa, synthetic construct
KAINGNGSPHKRGQNQQT

SEQ ID NO: 3846 - protein, 18 aa, synthetic construct
KTINGNGSPHSKAPNLQT

SEQ ID NO: 3847 - protein, 18 aa, synthetic construct
KTIKGGGSPHSKAQDQQT

SEQ ID NO: 3848 - protein, 18 aa, synthetic construct
KTINGHPSPHWKGQNQQT

SEQ ID NO: 3849 - protein, 5 aa, synthetic construct
SASPH

SEQ ID NO: 3850 - protein, 5 aa, synthetic construct
YDSPH

SEQ ID NO: 3851 - protein, 5 aa, synthetic construct
HGSPH

SEQ ID NO: 3852 - protein, 5 aa, synthetic construct
RDSPH

SEQ ID NO: 3853 - protein, 5 aa, synthetic construct
NDSPH

SEQ ID NO: 3854 - protein, 5 aa, synthetic construct
PDSPH

SEQ ID NO: 3855 - protein, 5 aa, synthetic construct
MGSPH

SEQ ID NO: 3856 - protein, 5 aa, synthetic construct
QVSPH

SEQ ID NO: 3857 - protein, 5 aa, synthetic construct
HNSPH

SEQ ID NO: 3858 - protein, 5 aa, synthetic construct
HPSPH

SEQ ID NO: 3859 - protein, 5 aa, synthetic construct
HSSPH

SEQ ID NO: 3860 - protein, 6 aa, synthetic construct
GSGSPH

SEQ ID NO: 3861 - protein, 6 aa, synthetic construct
GHDSPH

SEQ ID NO: 3862 - protein, 6 aa, synthetic construct
GQDSPH

SEQ ID NO: 3863 - protein, 6 aa, synthetic construct
VSGSPH

SEQ ID NO: 3864 - protein, 6 aa, synthetic construct
CSGSPH

SEQ ID NO: 3865 - protein, 6 aa, synthetic construct
GRGSPH

SEQ ID NO: 3866 - protein, 6 aa, synthetic construct
CSHSPH

SEQ ID NO: 3867 - protein, 6 aa, synthetic construct
GQSSPH

SEQ ID NO: 3868 - protein, 6 aa, synthetic construct
GSHSPH

SEQ ID NO: 3869 - protein, 6 aa, synthetic construct
GDDSPH

SEQ ID NO: 3870 - protein, 6 aa, synthetic construct
GHESPH

SEQ ID NO: 3871 - protein, 6 aa, synthetic construct
GNYSPH

SEQ ID NO: 3872 - protein, 6 aa, synthetic construct
RVGSPH

SEQ ID NO: 3873 - protein, 6 aa, synthetic construct
GSCSPH

SEQ ID NO: 3874 - protein, 6 aa, synthetic construct
GLLSPH

SEQ ID NO: 3875 - protein, 6 aa, synthetic construct
MSGSPH

SEQ ID NO: 3876 - protein, 6 aa, synthetic construct
RNGSPH

SEQ ID NO: 3877 - protein, 6 aa, synthetic construct
TSGSPH

SEQ ID NO: 3878 - protein, 6 aa, synthetic construct
ISGSPH

SEQ ID NO: 3879 - protein, 6 aa, synthetic construct
GPGSPH

SEQ ID NO: 3880 - protein, 6 aa, synthetic construct
ESGSPH

SEQ ID NO: 3881 - protein, 6 aa, synthetic construct
SSGSPH

SEQ ID NO: 3882 - protein, 6 aa, synthetic construct
GNGSPH

SEQ ID NO: 3883 - protein, 6 aa, synthetic construct
ASGSPH

SEQ ID NO: 3884 - protein, 6 aa, synthetic construct
NSGSPH

SEQ ID NO: 3885 - protein, 6 aa, synthetic construct
LSGSPH

SEQ ID NO: 3886 - protein, 6 aa, synthetic construct
GGGSPH

SEQ ID NO: 3887 - protein, 6 aa, synthetic construct
KSGSPH

SEQ ID NO: 3888 - protein, 6 aa, synthetic construct
HSGSPH

SEQ ID NO: 3889 - protein, 6 aa, synthetic construct
GTGSPH

SEQ ID NO: 3890 - protein, 6 aa, synthetic construct
PSGSPH

SEQ ID NO: 3891 - protein, 6 aa, synthetic construct
GSVSPH

SEQ ID NO: 3892 - protein, 6 aa, synthetic construct
RSGSPH

SEQ ID NO: 3893 - protein, 6 aa, synthetic construct
GIGSPH

SEQ ID NO: 3894 - protein, 6 aa, synthetic construct
WSGSPH

SEQ ID NO: 3895 - protein, 6 aa, synthetic construct
DSGSPH

SEQ ID NO: 3896 - protein, 6 aa, synthetic construct
IDGSPH

SEQ ID NO: 3897 - protein, 6 aa, synthetic construct
GLGSPH

SEQ ID NO: 3898 - protein, 6 aa, synthetic construct
DAGSPH

SEQ ID NO: 3899 - protein, 6 aa, synthetic construct
DGGSPH

SEQ ID NO: 3900 - protein, 6 aa, synthetic construct
MEGSPH

SEQ ID NO: 3901 - protein, 6 aa, synthetic construct
ENGSPH

SEQ ID NO: 3902 - protein, 6 aa, synthetic construct
GSASPH

SEQ ID NO: 3903 - protein, 6 aa, synthetic construct
KNGSPH

SEQ ID NO: 3904 - protein, 6 aa, synthetic construct
KEGSPH

SEQ ID NO: 3905 - protein, 6 aa, synthetic construct
AIGSPH

SEQ ID NO: 3906 - protein, 6 aa, synthetic construct
GYDSPH

SEQ ID NO: 3907 - protein, 6 aa, synthetic construct
GHGSPH

SEQ ID NO: 3908 - protein, 6 aa, synthetic construct
GRDSPH

SEQ ID NO: 3909 - protein, 6 aa, synthetic construct
GNDSPH

SEQ ID NO: 3910 - protein, 6 aa, synthetic construct
GPDSPH

SEQ ID NO: 3911 - protein, 6 aa, synthetic construct
GMGSPH

SEQ ID NO: 3912 - protein, 6 aa, synthetic construct
GQVSPH

SEQ ID NO: 3913 - protein, 6 aa, synthetic construct
GHNSPH

SEQ ID NO: 3914 - protein, 6 aa, synthetic construct
GHPSPH

SEQ ID NO: 3915 - protein, 6 aa, synthetic construct
GHSSPH

SEQ ID NO: 3916 - protein, 7 aa, synthetic construct
SGSPHSK

SEQ ID NO: 3917 - protein, 7 aa, synthetic construct
HDSPHKS

SEQ ID NO: 3918 - protein, 7 aa, synthetic construct
SGSPHAR

SEQ ID NO: 3919 - protein, 7 aa, synthetic construct
SGSPHVK

SEQ ID NO: 3920 - protein, 7 aa, synthetic construct
QDSPHKS

SEQ ID NO: 3921 - protein, 7 aa, synthetic construct
SGSPHKK

SEQ ID NO: 3922 - protein, 7 aa, synthetic construct
SGSPHVR

SEQ ID NO: 3923 - protein, 7 aa, synthetic construct
SGSPHAS

SEQ ID NO: 3924 - protein, 7 aa, synthetic construct
SGSPHRK

SEQ ID NO: 3925 - protein, 7 aa, synthetic construct
SGSPHKT

SEQ ID NO: 3926 - protein, 7 aa, synthetic construct
SHSPHKS

SEQ ID NO: 3927 - protein, 7 aa, synthetic construct
QSSPHRS

SEQ ID NO: 3928 - protein, 7 aa, synthetic construct
RGSPHAS

SEQ ID NO: 3929 - protein, 7 aa, synthetic construct
RGSPHSK

SEQ ID NO: 3930 - protein, 7 aa, synthetic construct
SGSPHKF

SEQ ID NO: 3931 - protein, 7 aa, synthetic construct
SGSPHKI

SEQ ID NO: 3932 - protein, 7 aa, synthetic construct
SGSPHKL

SEQ ID NO: 3933 - protein, 7 aa, synthetic construct
SGSPHKY

SEQ ID NO: 3934 - protein, 7 aa, synthetic construct
SGSPHTR

SEQ ID NO: 3935 - protein, 7 aa, synthetic construct
SHSPHKR

SEQ ID NO: 3936 - protein, 7 aa, synthetic construct
SGSPHGA

SEQ ID NO: 3937 - protein, 7 aa, synthetic construct
HDSPHKR

SEQ ID NO: 3938 - protein, 7 aa, synthetic construct
DDSPHKS

SEQ ID NO: 3939 - protein, 7 aa, synthetic construct
HESPHKS

SEQ ID NO: 3940 - protein, 7 aa, synthetic construct
NYSPHKI

SEQ ID NO: 3941 - protein, 7 aa, synthetic construct
SGSPHSR

SEQ ID NO: 3942 - protein, 7 aa, synthetic construct
SGSPHSL

SEQ ID NO: 3943 - protein, 7 aa, synthetic construct
SGSPHSS

SEQ ID NO: 3944 - protein, 7 aa, synthetic construct
VGSPHSK

SEQ ID NO: 3945 - protein, 7 aa, synthetic construct
SCSPHRK

SEQ ID NO: 3946 - protein, 7 aa, synthetic construct
SGSPHFL

SEQ ID NO: 3947 - protein, 7 aa, synthetic construct
LLSPHWK

SEQ ID NO: 3948 - protein, 7 aa, synthetic construct
NGSPHSK

SEQ ID NO: 3949 - protein, 7 aa, synthetic construct
PGSPHSK

SEQ ID NO: 3950 - protein, 7 aa, synthetic construct
GGSPHSK

SEQ ID NO: 3951 - protein, 7 aa, synthetic construct
TGSPHSK

SEQ ID NO: 3952 - protein, 7 aa, synthetic construct
SVSPHGK

SEQ ID NO: 3953 - protein, 7 aa, synthetic construct
SGSPHTK

SEQ ID NO: 3954 - protein, 7 aa, synthetic construct
IGSPHSK

SEQ ID NO: 3955 - protein, 7 aa, synthetic construct
DGSPHSK

SEQ ID NO: 3956 - protein, 7 aa, synthetic construct
SGSPHNK

SEQ ID NO: 3957 - protein, 7 aa, synthetic construct
LGSPHSK

SEQ ID NO: 3958 - protein, 7 aa, synthetic construct
AGSPHSK

SEQ ID NO: 3959 - protein, 7 aa, synthetic construct
EGSPHSK

SEQ ID NO: 3960 - protein, 7 aa, synthetic construct
SASPHSK

SEQ ID NO: 3961 - protein, 7 aa, synthetic construct
SGSPHAK

SEQ ID NO: 3962 - protein, 7 aa, synthetic construct
HDSPHKI

SEQ ID NO: 3963 - protein, 7 aa, synthetic construct
YDSPHKS

SEQ ID NO: 3964 - protein, 7 aa, synthetic construct
HDSPHKT

SEQ ID NO: 3965 - protein, 7 aa, synthetic construct
RGSPHKR

SEQ ID NO: 3966 - protein, 7 aa, synthetic construct
HGSPHSK

SEQ ID NO: 3967 - protein, 7 aa, synthetic construct
RDSPHKS

SEQ ID NO: 3968 - protein, 7 aa, synthetic construct
NDSPHKS

SEQ ID NO: 3969 - protein, 7 aa, synthetic construct
QDSPHKI

SEQ ID NO: 3970 - protein, 7 aa, synthetic construct
PDSPHKI

SEQ ID NO: 3971 - protein, 7 aa, synthetic construct
PDSPHKS

SEQ ID NO: 3972 - protein, 7 aa, synthetic construct
MGSPHSK

SEQ ID NO: 3973 - protein, 7 aa, synthetic construct
HDSPHKH

SEQ ID NO: 3974 - protein, 7 aa, synthetic construct
QVSPHKS

SEQ ID NO: 3975 - protein, 7 aa, synthetic construct
HNSPHKS

SEQ ID NO: 3976 - protein, 7 aa, synthetic construct
NGSPHKR

SEQ ID NO: 3977 - protein, 7 aa, synthetic construct
HDSPHKY

SEQ ID NO: 3978 - protein, 7 aa, synthetic construct
NDSPHKI

SEQ ID NO: 3979 - protein, 7 aa, synthetic construct
HDSPHKL

SEQ ID NO: 3980 - protein, 7 aa, synthetic construct
HPSPHWK

SEQ ID NO: 3981 - protein, 7 aa, synthetic construct
HDSPHKM

SEQ ID NO: 3982 - protein, 7 aa, synthetic construct
HSSPHRS

SEQ ID NO: 3983 - protein, 9 aa, synthetic construct
GSGSPHARM

SEQ ID NO: 3984 - protein, 9 aa, synthetic construct
GSGSPHVKS

SEQ ID NO: 3985 - protein, 9 aa, synthetic construct
GQDSPHKSG

SEQ ID NO: 3986 - protein, 9 aa, synthetic construct
GSGSPHASR

SEQ ID NO: 3987 - protein, 9 aa, synthetic construct
GSGSPHVKI

SEQ ID NO: 3988 - protein, 9 aa, synthetic construct
GSGSPHKKN

SEQ ID NO: 3989 - protein, 9 aa, synthetic construct
GSGSPHVRM

SEQ ID NO: 3990 - protein, 9 aa, synthetic construct
VSGSPHSKA

SEQ ID NO: 3991 - protein, 9 aa, synthetic construct
CSGSPHSKA

SEQ ID NO: 3992 - protein, 9 aa, synthetic construct
GSGSPHRKA

SEQ ID NO: 3993 - protein, 9 aa, synthetic construct
CSGSPHKTS

SEQ ID NO: 3994 - protein, 9 aa, synthetic construct
CSHSPHKSG

SEQ ID NO: 3995 - protein, 9 aa, synthetic construct
GQSSPHRSG

SEQ ID NO: 3996 - protein, 9 aa, synthetic construct
GRGSPHASR

SEQ ID NO: 3997 - protein, 9 aa, synthetic construct
GRGSPHSKA

SEQ ID NO: 3998 - protein, 9 aa, synthetic construct
GSGSPHKFG

SEQ ID NO: 3999 - protein, 9 aa, synthetic construct
GSGSPHKIG

SEQ ID NO: 4000 - protein, 9 aa, synthetic construct
GSGSPHKLG

SEQ ID NO: 4001 - protein, 9 aa, synthetic construct
GSGSPHKTS

SEQ ID NO: 4002 - protein, 9 aa, synthetic construct
GSGSPHKTT

SEQ ID NO: 4003 - protein, 9 aa, synthetic construct
GSGSPHKTY

SEQ ID NO: 4004 - protein, 9 aa, synthetic construct
GSGSPHKYG

SEQ ID NO: 4005 - protein, 9 aa, synthetic construct
GSGSPHSKD

SEQ ID NO: 4006 - protein, 9 aa, synthetic construct
GSGSPHSKP

SEQ ID NO: 4007 - protein, 9 aa, synthetic construct
GSGSPHTRG

SEQ ID NO: 4008 - protein, 9 aa, synthetic construct
GSGSPHVRG

SEQ ID NO: 4009 - protein, 9 aa, synthetic construct
GSHSPHKRG

SEQ ID NO: 4010 - protein, 9 aa, synthetic construct
GSHSPHKSG

SEQ ID NO: 4011 - protein, 9 aa, synthetic construct
VSGSPHASR

SEQ ID NO: 4012 - protein, 9 aa, synthetic construct
VSGSPHGAR

SEQ ID NO: 4013 - protein, 9 aa, synthetic construct
VSGSPHKFG

SEQ ID NO: 4014 - protein, 9 aa, synthetic construct
GHDSPHKRG

SEQ ID NO: 4015 - protein, 9 aa, synthetic construct
GDDSPHKSG

SEQ ID NO: 4016 - protein, 9 aa, synthetic construct
GHESPHKSA

SEQ ID NO: 4017 - protein, 9 aa, synthetic construct
GHDSPHKSA

SEQ ID NO: 4018 - protein, 9 aa, synthetic construct
GNYSPHKIG

SEQ ID NO: 4019 - protein, 9 aa, synthetic construct
GHDSPHKSR

SEQ ID NO: 4020 - protein, 9 aa, synthetic construct
GSGSPHSKL

SEQ ID NO: 4021 - protein, 9 aa, synthetic construct
GSGSPHSRA

SEQ ID NO: 4022 - protein, 9 aa, synthetic construct
GSGSPHSKR

SEQ ID NO: 4023 - protein, 9 aa, synthetic construct
GSGSPHSLR

SEQ ID NO: 4024 - protein, 9 aa, synthetic construct
GSGSPHSRG

SEQ ID NO: 4025 - protein, 9 aa, synthetic construct
GSGSPHSSR

SEQ ID NO: 4026 - protein, 9 aa, synthetic construct
RVGSPHSKA

SEQ ID NO: 4027 - protein, 9 aa, synthetic construct
GSCSPHRKA

SEQ ID NO: 4028 - protein, 9 aa, synthetic construct
GSGSPHFLR

SEQ ID NO: 4029 - protein, 9 aa, synthetic construct
GSGSPHSKW

SEQ ID NO: 4030 - protein, 9 aa, synthetic construct
GSGSPHSKS

SEQ ID NO: 4031 - protein, 9 aa, synthetic construct
GLLSPHWKA

SEQ ID NO: 4032 - protein, 9 aa, synthetic construct
GSGSPHVRR

SEQ ID NO: 4033 - protein, 9 aa, synthetic construct
GSGSPHSKV

SEQ ID NO: 4034 - protein, 9 aa, synthetic construct
MSGSPHSKA

SEQ ID NO: 4035 - protein, 9 aa, synthetic construct
RNGSPHSKA

SEQ ID NO: 4036 - protein, 9 aa, synthetic construct
TSGSPHSKA

SEQ ID NO: 4037 - protein, 9 aa, synthetic construct
ISGSPHSKA

SEQ ID NO: 4038 - protein, 9 aa, synthetic construct
GPGSPHSKA

SEQ ID NO: 4039 - protein, 9 aa, synthetic construct
GSGSPHSKT

SEQ ID NO: 4040 - protein, 9 aa, synthetic construct
ESGSPHSKA

SEQ ID NO: 4041 - protein, 9 aa, synthetic construct
SSGSPHSKA

SEQ ID NO: 4042 - protein, 9 aa, synthetic construct
GNGSPHSKA

SEQ ID NO: 4043 - protein, 9 aa, synthetic construct
ASGSPHSKA

SEQ ID NO: 4044 - protein, 9 aa, synthetic construct
NSGSPHSKA

SEQ ID NO: 4045 - protein, 9 aa, synthetic construct
LSGSPHSKA

SEQ ID NO: 4046 - protein, 9 aa, synthetic construct
GGGSPHSKA

SEQ ID NO: 4047 - protein, 9 aa, synthetic construct
KSGSPHSKA

SEQ ID NO: 4048 - protein, 9 aa, synthetic construct
GGGSPHSKS

SEQ ID NO: 4049 - protein, 9 aa, synthetic construct
GSGSPHSKG

SEQ ID NO: 4050 - protein, 9 aa, synthetic construct
HSGSPHSKA

SEQ ID NO: 4051 - protein, 9 aa, synthetic construct
GTGSPHSKA

SEQ ID NO: 4052 - protein, 9 aa, synthetic construct
PSGSPHSKA

SEQ ID NO: 4053 - protein, 9 aa, synthetic construct
GSVSPHGKA

SEQ ID NO: 4054 - protein, 9 aa, synthetic construct
RSGSPHSKA

SEQ ID NO: 4055 - protein, 9 aa, synthetic construct
GSGSPHTKA

SEQ ID NO: 4056 - protein, 9 aa, synthetic construct
GIGSPHSKA

SEQ ID NO: 4057 - protein, 9 aa, synthetic construct
WSGSPHSKA

SEQ ID NO: 4058 - protein, 9 aa, synthetic construct
DSGSPHSKA

SEQ ID NO: 4059 - protein, 9 aa, synthetic construct
IDGSPHSKA

SEQ ID NO: 4060 - protein, 9 aa, synthetic construct
GSGSPHNKA

SEQ ID NO: 4061 - protein, 9 aa, synthetic construct
GLGSPHSKS

SEQ ID NO: 4062 - protein, 18 aa, synthetic construct
KTVNGHDSPHSKAQNQQT

SEQ ID NO: 4063 - protein, 9 aa, synthetic construct
DAGSPHSKA

SEQ ID NO: 4064 - protein, 9 aa, synthetic construct
DGGSPHSKA

SEQ ID NO: 4065 - protein, 9 aa, synthetic construct
MEGSPHSKA

SEQ ID NO: 4066 - protein, 9 aa, synthetic construct
ENGSPHSKA

SEQ ID NO: 4067 - protein, 9 aa, synthetic construct
GSASPHSKA

SEQ ID NO: 4068 - protein, 9 aa, synthetic construct
GNGSPHSKS

SEQ ID NO: 4069 - protein, 9 aa, synthetic construct
KNGSPHSKA

SEQ ID NO: 4070 - protein, 9 aa, synthetic construct
KEGSPHSKA

SEQ ID NO: 4071 - protein, 9 aa, synthetic construct
AIGSPHSKA

SEQ ID NO: 4072 - protein, 9 aa, synthetic construct
GSGSPHSKN

SEQ ID NO: 4073 - protein, 9 aa, synthetic construct
GSGSPHAKA

SEQ ID NO: 4074 - protein, 9 aa, synthetic construct
GHDSPHKIG

SEQ ID NO: 4075 - protein, 9 aa, synthetic construct
GYDSPHKSG

SEQ ID NO: 4076 - protein, 9 aa, synthetic construct
GHESPHKSG

SEQ ID NO: 4077 - protein, 9 aa, synthetic construct
GHDSPHKTG

SEQ ID NO: 4078 - protein, 9 aa, synthetic construct
GRGSPHKRG

SEQ ID NO: 4079 - protein, 9 aa, synthetic construct
GHDSPHKSL

SEQ ID NO: 4080 - protein, 9 aa, synthetic construct
GHGSPHSKA

SEQ ID NO: 4081 - protein, 18 aa, synthetic construct
KTINGSGSPHKSGQNQQP

SEQ ID NO: 4082 - protein, 9 aa, synthetic construct
GHDSPHKSE

SEQ ID NO: 4083 - protein, 9 aa, synthetic construct
GRDSPHKSG

SEQ ID NO: 4084 - protein, 9 aa, synthetic construct
GNDSPHKSV

SEQ ID NO: 4085 - protein, 9 aa, synthetic construct
GQDSPHKIG

SEQ ID NO: 4086 - protein, 9 aa, synthetic construct
GHDSPHKSV

SEQ ID NO: 4087 - protein, 9 aa, synthetic construct
GPDSPHKIG

SEQ ID NO: 4088 - protein, 9 aa, synthetic construct
GPDSPHKSG

SEQ ID NO: 4089 - protein, 9 aa, synthetic construct
GHDSPHKSW

SEQ ID NO: 4090 - protein, 9 aa, synthetic construct
GHDSPHKSN

SEQ ID NO: 4091 - protein, 9 aa, synthetic construct
GMGSPHSKT

SEQ ID NO: 4092 - protein, 9 aa, synthetic construct
GHDSPHKHG

SEQ ID NO: 4093 - protein, 9 aa, synthetic construct
GQVSPHKSG

SEQ ID NO: 4094 - protein, 9 aa, synthetic construct
GDDSPHKSV

SEQ ID NO: 4095 - protein, 9 aa, synthetic construct
GHNSPHKSG

SEQ ID NO: 4096 - protein, 9 aa, synthetic construct
GNGSPHKRG

SEQ ID NO: 4097 - protein, 9 aa, synthetic construct
GHDSPHKYG

SEQ ID NO: 4098 - protein, 18 aa, synthetic construct
KTISKRGSPHSKAQNQQT

SEQ ID NO: 4099 - protein, 18 aa, synthetic construct
KGLGGSGSPHSKAQNQQT

SEQ ID NO: 4100 - protein, 18 aa, synthetic construct
KTINGHDSPHSKAQNLQT

SEQ ID NO: 4101 - protein, 18 aa, synthetic construct
KTINGHDSPHSKAQNQQI

SEQ ID NO: 4102 - protein, 18 aa, synthetic construct
KTINGSGSPHFTRQNQQT

SEQ ID NO: 4103 - protein, 18 aa, synthetic construct
KTINGSGSPHSLPWNQQT

SEQ ID NO: 4104 - protein, 18 aa, synthetic construct
KTINGHDSPHSKAQNHQT

SEQ ID NO: 4105 - protein, 18 aa, synthetic construct
KTMNGHDSPHSKAQNQQT

SEQ ID NO: 4106 - protein, 18 aa, synthetic construct
KPYKGSGSPHSKAQNQQT

SEQ ID NO: 4107 - protein, 18 aa, synthetic construct
KRLWGSGSPHSKAQNQQT

SEQ ID NO: 4108 - protein, 18 aa, synthetic construct
KRMRGSGSPHSKAQNQQT

SEQ ID NO: 4109 - protein, 18 aa, synthetic construct
KRTYGSGSPHSKAQNQQT

SEQ ID NO: 4110 - protein, 18 aa, synthetic construct
KTINCLRSPHSKAQNQQT

SEQ ID NO: 4111 - protein, 18 aa, synthetic construct
KTINFSRSPHSKAQNQQT

SEQ ID NO: 4112 - protein, 18 aa, synthetic construct
KTINGLRSPHFKAQNQQT

SEQ ID NO: 4113 - protein, 18 aa, synthetic construct
KTINGNRSPHNKAQNQQT

SEQ ID NO: 4114 - protein, 18 aa, synthetic construct
KTINGPRSPHYKAQNQQT

SEQ ID NO: 4115 - protein, 18 aa, synthetic construct
KTINGQASPHWKAQNQQT

SEQ ID NO: 4116 - protein, 18 aa, synthetic construct
KTINGRCSPHSKAQNQQT

SEQ ID NO: 4117 - protein, 18 aa, synthetic construct
KTINGRHSPHSKAQNQQT

SEQ ID NO: 4118 - protein, 18 aa, synthetic construct
KTINGRKSPHRKAQNQQT

SEQ ID NO: 4119 - protein, 18 aa, synthetic construct
KTINGRLSPHWKAQNQQT

SEQ ID NO: 4120 - protein, 18 aa, synthetic construct
KTINGRLSPHYKAQNQQT

SEQ ID NO: 4121 - protein, 18 aa, synthetic construct
KTINGRPSPHMKAQNQQT

SEQ ID NO: 4122 - protein, 18 aa, synthetic construct
KTINGRSSPHWKAQNQQT

SEQ ID NO: 4123 - protein, 18 aa, synthetic construct
KTINGRWSPHSKAQNQQT

SEQ ID NO: 4124 - protein, 18 aa, synthetic construct
KTINGSGSPHAPCQNQQT

SEQ ID NO: 4125 - protein, 18 aa, synthetic construct
KTINGSGSPHAWAQNQQT

SEQ ID NO: 4126 - protein, 18 aa, synthetic construct
KTINGSGSPHCMRQNQQT

SEQ ID NO: 4127 - protein, 18 aa, synthetic construct
KTINGSGSPHFCSQNQQT

SEQ ID NO: 4128 - protein, 18 aa, synthetic construct
KTINGSGSPHFLFQNQQT

SEQ ID NO: 4129 - protein, 18 aa, synthetic construct
KTINGSGSPHFWAQNQQT

SEQ ID NO: 4130 - protein, 18 aa, synthetic construct
KTINGSGSPHLCAQNQQT

SEQ ID NO: 4131 - protein, 18 aa, synthetic construct
KTINGSGSPHLRYQNQQT

SEQ ID NO: 4132 - protein, 18 aa, synthetic construct
KTINGSGSPHLYYQNQQT

SEQ ID NO: 4133 - protein, 18 aa, synthetic construct
KTINGSGSPHPLCQNQQT

SEQ ID NO: 4134 - protein, 18 aa, synthetic construct
KTINGSGSPHRIRQNQQT

SEQ ID NO: 4135 - protein, 18 aa, synthetic construct
KTINGSGSPHRLFQNQQT

SEQ ID NO: 4136 - protein, 18 aa, synthetic construct
KTINGSGSPHSCGQNQQT

SEQ ID NO: 4137 - protein, 18 aa, synthetic construct
KTINGSGSPHSCLRNQQT

SEQ ID NO: 4138 - protein, 18 aa, synthetic construct
KTINGSGSPHSCLSNQQT

SEQ ID NO: 4139 - protein, 18 aa, synthetic construct
KTINGSGSPHSCRLNQQT

SEQ ID NO: 4140 - protein, 18 aa, synthetic construct
KTINGSGSPHSCSLNQQT

SEQ ID NO: 4141 - protein, 18 aa, synthetic construct
KTINGSGSPHSKACTLQT

SEQ ID NO: 4142 - protein, 18 aa, synthetic construct
KTINGSGSPHSKAFRAQT

SEQ ID NO: 4143 - protein, 18 aa, synthetic construct
KTINGSGSPHSKAIRKQT

SEQ ID NO: 4144 - protein, 18 aa, synthetic construct
KTINGSGSPHSKAQASRT

SEQ ID NO: 4145 - protein, 18 aa, synthetic construct
KTINGSGSPHSKAQFELT

SEQ ID NO: 4146 - protein, 18 aa, synthetic construct
KTINGSGSPHSKAQIVIT

SEQ ID NO: 4147 - protein, 18 aa, synthetic construct
KTINGSGSPHSKAQLART

SEQ ID NO: 4148 - protein, 18 aa, synthetic construct
KTINGSGSPHSKAQLQRT

SEQ ID NO: 4149 - protein, 18 aa, synthetic construct
KTINGSGSPHSKAQNARR

SEQ ID NO: 4150 - protein, 18 aa, synthetic construct
KTINGSGSPHSKAQNCPR

SEQ ID NO: 4151 - protein, 18 aa, synthetic construct
KTINGSGSPHSKAQNMRR

SEQ ID NO: 4152 - protein, 18 aa, synthetic construct
KTINGSGSPHSKAQNRRV

SEQ ID NO: 4153 - protein, 18 aa, synthetic construct
KTINGSGSPHSKAQPSRT

SEQ ID NO: 4154 - protein, 18 aa, synthetic construct
KTINGSGSPHSKAQQVKT

SEQ ID NO: 4155 - protein, 18 aa, synthetic construct
KTINGSGSPHSKAQQVRT

SEQ ID NO: 4156 - protein, 18 aa, synthetic construct
KTINGSGSPHSKAQRLKT

SEQ ID NO: 4157 - protein, 18 aa, synthetic construct
KTINGSGSPHSKAQRRAT

SEQ ID NO: 4158 - protein, 18 aa, synthetic construct
KTINGSGSPHSKAQRRGT

SEQ ID NO: 4159 - protein, 18 aa, synthetic construct
KTINGSGSPHSKAQRRRT

SEQ ID NO: 4160 - protein, 18 aa, synthetic construct
KTINGSGSPHSKAQRTRT

SEQ ID NO: 4161 - protein, 18 aa, synthetic construct
KTINGSGSPHSKAQRVHT

SEQ ID NO: 4162 - protein, 18 aa, synthetic construct
KTINGSGSPHSKAQTYRT

SEQ ID NO: 4163 - protein, 18 aa, synthetic construct
KTINGSGSPHSKAQVRKT

SEQ ID NO: 4164 - protein, 18 aa, synthetic construct
KTINGSGSPHSKARGRQT

SEQ ID NO: 4165 - protein, 18 aa, synthetic construct
KTINGSGSPHSKARLCQT

SEQ ID NO: 4166 - protein, 18 aa, synthetic construct
KTINGSGSPHSKARLKQT

SEQ ID NO: 4167 - protein, 18 aa, synthetic construct
KTINGSGSPHSKARNSQT

SEQ ID NO: 4168 - protein, 18 aa, synthetic construct
KTINGSGSPHSKARWVQT

SEQ ID NO: 4169 - protein, 18 aa, synthetic construct
KTINGSGSPHSKAVRWQT

SEQ ID NO: 4170 - protein, 18 aa, synthetic construct
KTINGSGSPHSKAYTRQT

SEQ ID NO: 4171 - protein, 18 aa, synthetic construct
KTINGSGSPHSKCQSQQT

SEQ ID NO: 4172 - protein, 18 aa, synthetic construct
KTINGSGSPHSKFLRQQT

SEQ ID NO: 4173 - protein, 18 aa, synthetic construct
KTINGSGSPHSKFRFQQT

SEQ ID NO: 4174 - protein, 18 aa, synthetic construct
KTINGSGSPHSKFRLQQT

SEQ ID NO: 4175 - protein, 18 aa, synthetic construct
KTINGSGSPHSKFRRQQT

SEQ ID NO: 4176 - protein, 18 aa, synthetic construct
KTINGSGSPHSKGMKQQT

SEQ ID NO: 4177 - protein, 18 aa, synthetic construct
KTINGSGSPHSKKLRQQT

SEQ ID NO: 4178 - protein, 18 aa, synthetic construct
KTINGSGSPHSKKRPQQT

SEQ ID NO: 4179 - protein, 18 aa, synthetic construct
KTINGSGSPHSKKSRQQT

SEQ ID NO: 4180 - protein, 18 aa, synthetic construct
KTINGSGSPHSKLYRQQT

SEQ ID NO: 4181 - protein, 18 aa, synthetic construct
KTINGSGSPHSKLYWQQT

SEQ ID NO: 4182 - protein, 18 aa, synthetic construct
KTINGSGSPHSKPRMQQT

SEQ ID NO: 4183 - protein, 18 aa, synthetic construct
KTINGSGSPHSKRFPQQT

SEQ ID NO: 4184 - protein, 18 aa, synthetic construct
KTINGSGSPHSKRFRQQT

SEQ ID NO: 4185 - protein, 18 aa, synthetic construct
KTINGSGSPHSKRPYQQT

SEQ ID NO: 4186 - protein, 18 aa, synthetic construct
KTINGSGSPHSKRRMQQT

SEQ ID NO: 4187 - protein, 18 aa, synthetic construct
KTINGSGSPHSKRSKQQT

SEQ ID NO: 4188 - protein, 18 aa, synthetic construct
KTINGSGSPHSKRSRQQT

SEQ ID NO: 4189 - protein, 18 aa, synthetic construct
KTINGSGSPHSKRTMQQT

SEQ ID NO: 4190 - protein, 18 aa, synthetic construct
KTINGSGSPHSKRTRQQT

SEQ ID NO: 4191 - protein, 18 aa, synthetic construct
KTINGSGSPHSKRVRQQT

SEQ ID NO: 4192 - protein, 18 aa, synthetic construct
KTINGSGSPHSKRYIQQT

SEQ ID NO: 4193 - protein, 18 aa, synthetic construct
KTINGSGSPHSKRYNQQT

SEQ ID NO: 4194 - protein, 18 aa, synthetic construct
KTINGSGSPHSKRYPQQT

SEQ ID NO: 4195 - protein, 18 aa, synthetic construct
KTINGSGSPHSKRYSQQT

SEQ ID NO: 4196 - protein, 18 aa, synthetic construct
KTINGSGSPHSKTCIQQT

SEQ ID NO: 4197 - protein, 18 aa, synthetic construct
KTINGSGSPHSKWLTQQT

SEQ ID NO: 4198 - protein, 18 aa, synthetic construct
KTINGSGSPHSKWVVQQT

SEQ ID NO: 4199 - protein, 18 aa, synthetic construct
KTINGSGSPHSKYRLQQT

SEQ ID NO: 4200 - protein, 18 aa, synthetic construct
KTINGSGSPHSKYSKQQT

SEQ ID NO: 4201 - protein, 18 aa, synthetic construct
KTINGSGSPHSKYSRQQT

SEQ ID NO: 4202 - protein, 18 aa, synthetic construct
KTINGSGSPHSLKRNQQT

SEQ ID NO: 4203 - protein, 18 aa, synthetic construct
KTINGSGSPHSLWFNQQT

SEQ ID NO: 4204 - protein, 18 aa, synthetic construct
KTINGSGSPHSLWPNQQT

SEQ ID NO: 4205 - protein, 18 aa, synthetic construct
KTINGSGSPHSLWTNQQT

SEQ ID NO: 4206 - protein, 18 aa, synthetic construct
KTINGSGSPHSMRRNQQT

SEQ ID NO: 4207 - protein, 18 aa, synthetic construct
KTINGSGSPHSPCLNQQT

SEQ ID NO: 4208 - protein, 18 aa, synthetic construct
KTINGSGSPHSQWQNQQT

SEQ ID NO: 4209 - protein, 18 aa, synthetic construct
KTINGSGSPHSRCANQQT

SEQ ID NO: 4210 - protein, 18 aa, synthetic construct
KTINGSGSPHSRIRNQQT

SEQ ID NO: 4211 - protein, 18 aa, synthetic construct
KTINGSGSPHSRKSNQQT

SEQ ID NO: 4212 - protein, 18 aa, synthetic construct
KTINGSGSPHSRLWNQQT

SEQ ID NO: 4213 - protein, 18 aa, synthetic construct
KTINGSGSPHSRRFNQQT

SEQ ID NO: 4214 - protein, 18 aa, synthetic construct
KTINGSGSPHSRRPNQQT

SEQ ID NO: 4215 - protein, 18 aa, synthetic construct
KTINGSGSPHSRSCNQQT

SEQ ID NO: 4216 - protein, 18 aa, synthetic construct
KTINGSGSPHSRSKNQQT

SEQ ID NO: 4217 - protein, 18 aa, synthetic construct
KTINGSGSPHSRTKNQQT

SEQ ID NO: 4218 - protein, 18 aa, synthetic construct
KTINGSGSPHSRWLNQQT

SEQ ID NO: 4219 - protein, 18 aa, synthetic construct
KTINGSGSPHSSVCNQQT

SEQ ID NO: 4220 - protein, 18 aa, synthetic construct
KTINGSGSPHSSWRNQQT

SEQ ID NO: 4221 - protein, 18 aa, synthetic construct
KTINGSGSPHSVCQNQQT

SEQ ID NO: 4222 - protein, 18 aa, synthetic construct
KTINGSGSPHSVLCNQQT

SEQ ID NO: 4223 - protein, 18 aa, synthetic construct
KTINGSGSPHSVRRNQQT

SEQ ID NO: 4224 - protein, 18 aa, synthetic construct
KTINGSGSPHSVSCNQQT

SEQ ID NO: 4225 - protein, 18 aa, synthetic construct
KTINGSGSPHSWALNQQT

SEQ ID NO: 4226 - protein, 18 aa, synthetic construct
KTINGSGSPHSWITNQQT

SEQ ID NO: 4227 - protein, 18 aa, synthetic construct
KTINGSGSPHSWPMNQQT

SEQ ID NO: 4228 - protein, 18 aa, synthetic construct
KTINGSGSPHSWRSNQQT

SEQ ID NO: 4229 - protein, 18 aa, synthetic construct
KTINGSGSPHSYFLNQQT

SEQ ID NO: 4230 - protein, 18 aa, synthetic construct
KTINGSGSPHSYTYNQQT

SEQ ID NO: 4231 - protein, 18 aa, synthetic construct
KTINGSGSPHSYWQNQQT

SEQ ID NO: 4232 - protein, 18 aa, synthetic construct
KTINGSGSPHTLCQNQQT

SEQ ID NO: 4233 - protein, 18 aa, synthetic construct
KTINGSGSPHWLRQNQQT

SEQ ID NO: 4234 - protein, 18 aa, synthetic construct
KTINGSGSPHWPSQNQQT

SEQ ID NO: 4235 - protein, 18 aa, synthetic construct
KTINGSGSPHYLRQNQQT

SEQ ID NO: 4236 - protein, 18 aa, synthetic construct
KTINGSGSPHYTRQNQQT

SEQ ID NO: 4237 - protein, 18 aa, synthetic construct
KTINGSLSPHLWAQNQQT

SEQ ID NO: 4238 - protein, 18 aa, synthetic construct
KTINGSPSPHCQAQNQQT

SEQ ID NO: 4239 - protein, 18 aa, synthetic construct
KTINGSRSPHLCAQNQQT

SEQ ID NO: 4240 - protein, 18 aa, synthetic construct
KTINGSRSPHWRAQNQQT

SEQ ID NO: 4241 - protein, 18 aa, synthetic construct
KTINGSVSPHWLAQNQQT

SEQ ID NO: 4242 - protein, 18 aa, synthetic construct
KTINGTFSPHRKAQNQQT

SEQ ID NO: 4243 - protein, 18 aa, synthetic construct
KTINGWTSPHRKAQNQQT

SEQ ID NO: 4244 - protein, 18 aa, synthetic construct
KTINRGISPHSKAQNQQT

SEQ ID NO: 4245 - protein, 18 aa, synthetic construct
KTINTVRSPHSKAQNQQT

SEQ ID NO: 4246 - protein, 18 aa, synthetic construct
KTKLRSGSPHSKAQNQQT

SEQ ID NO: 4247 - protein, 18 aa, synthetic construct
KTRLRSGSPHSKAQNQQT

SEQ ID NO: 4248 - protein, 18 aa, synthetic construct
KWLLGSGSPHSKAQNQQT

SEQ ID NO: 4249 - protein, 18 aa, synthetic construct
KWSQGSGSPHSKAQNQQT

SEQ ID NO: 4250 - protein, 18 aa, synthetic construct
KWYLGSGSPHSKAQNQQT

SEQ ID NO: 4251 - protein, 18 aa, synthetic construct
KYHSGSGSPHSKAQNQQT

SEQ ID NO: 4252 - protein, 18 aa, synthetic construct
KYLPGSGSPHSKAQNQQT

SEQ ID NO: 4253 - protein, 18 aa, synthetic construct
KAINGGGSPHSKTQNQQT

SEQ ID NO: 4254 - protein, 18 aa, synthetic construct
KAINGHDSPHKRSPNQQT

SEQ ID NO: 4255 - protein, 18 aa, synthetic construct
KAINGHDSPHKSFSPQQT

SEQ ID NO: 4256 - protein, 18 aa, synthetic construct
KAINGHDSPHKSGENQQP

SEQ ID NO: 4257 - protein, 18 aa, synthetic construct
KAINGHDSPHKSGQLART

SEQ ID NO: 4258 - protein, 18 aa, synthetic construct
KAINGHDSPHKSGQNAFL

SEQ ID NO: 4259 - protein, 18 aa, synthetic construct
KAINGHDSPHKSGQNAYT

SEQ ID NO: 4260 - protein, 18 aa, synthetic construct
KAINGHDSPHKSGQNFAS

SEQ ID NO: 4261 - protein, 18 aa, synthetic construct
KAINGHDSPHKSGQNLAS

SEQ ID NO: 4262 - protein, 18 aa, synthetic construct
KAINGHDSPHKSGQNLGS

SEQ ID NO: 4263 - protein, 18 aa, synthetic construct
KAINGHDSPHKSGQNLKF

SEQ ID NO: 4264 - protein, 18 aa, synthetic construct
KAINGHDSPHKSGQNLLK

SEQ ID NO: 4265 - protein, 18 aa, synthetic construct
KAINGHDSPHKSGQNLSR

SEQ ID NO: 4266 - protein, 18 aa, synthetic construct
KAINGHDSPHKSGQNLSS

SEQ ID NO: 4267 - protein, 18 aa, synthetic construct
KAINGHDSPHKSGQNSLG

SEQ ID NO: 4268 - protein, 18 aa, synthetic construct
KAINGHDSPHKSGQNTLQ

SEQ ID NO: 4269 - protein, 18 aa, synthetic construct
KAINGHDSPHKSGQNTSL

SEQ ID NO: 4270 - protein, 18 aa, synthetic construct
KAINGHDSPHKSGQRLGT

SEQ ID NO: 4271 - protein, 18 aa, synthetic construct
KAINGHDSPHKSGQRNYT

SEQ ID NO: 4272 - protein, 18 aa, synthetic construct
KAINGHDSPHKSGQRPST

SEQ ID NO: 4273 - protein, 18 aa, synthetic construct
KAINGHDSPHKSGQRPVT

SEQ ID NO: 4274 - protein, 18 aa, synthetic construct
KAINGHDSPHKSGQVPST

SEQ ID NO: 4275 - protein, 18 aa, synthetic construct
KAINGHDSPHKSLSNQQT

SEQ ID NO: 4276 - protein, 18 aa, synthetic construct
KAINGHDSPHKSVLSQQT

SEQ ID NO: 4277 - protein, 18 aa, synthetic construct
KAINGHDSPHKTLQNQQT

SEQ ID NO: 4278 - protein, 18 aa, synthetic construct
KAINGHNSPHSKAQNQQT

SEQ ID NO: 4279 - protein, 18 aa, synthetic construct
KAINGLDSPHSKAQNQQT

SEQ ID NO: 4280 - protein, 18 aa, synthetic construct
KAINGSGSPHKSGQNQQT

SEQ ID NO: 4281 - protein, 18 aa, synthetic construct
KAINGSGSPHSKAQGQQT

SEQ ID NO: 4282 - protein, 18 aa, synthetic construct
KAINGSGSPHSKAQLSGT

SEQ ID NO: 4283 - protein, 18 aa, synthetic construct
KAINGSGSPHSKAQNGSL

SEQ ID NO: 4284 - protein, 18 aa, synthetic construct
KAINGSGSPHSKAQNSLL

SEQ ID NO: 4285 - protein, 18 aa, synthetic construct
KAINGSGSPHSKAVGLQT

SEQ ID NO: 4286 - protein, 18 aa, synthetic construct
KAINGSGSPHSKSLLQQT

SEQ ID NO: 4287 - protein, 18 aa, synthetic construct
KAINGSGSPHSKSLPQQT

SEQ ID NO: 4288 - protein, 18 aa, synthetic construct
KAINGSGSPHSKSTFQQT

SEQ ID NO: 4289 - protein, 18 aa, synthetic construct
KAITGHDSPHSKAQNQQT

SEQ ID NO: 4290 - protein, 18 aa, synthetic construct
KDVMGSGSPHSKAQNQQT

SEQ ID NO: 4291 - protein, 18 aa, synthetic construct
KEIVGSGSPHSKAQNQQT

SEQ ID NO: 4292 - protein, 18 aa, synthetic construct
KEIYGSGSPHSKAQNQQT

SEQ ID NO: 4293 - protein, 18 aa, synthetic construct
KELSGSGSPHSKAQNQQT

SEQ ID NO: 4294 - protein, 18 aa, synthetic construct
KETIGSGSPHSKAQNQQT

SEQ ID NO: 4295 - protein, 18 aa, synthetic construct
KEVLGSGSPHSKAQNQQT

SEQ ID NO: 4296 - protein, 18 aa, synthetic construct
KFALGHDSPHKSGQKQQT

SEQ ID NO: 4297 - protein, 18 aa, synthetic construct
KIINGHDSPHKSGQNLVL

SEQ ID NO: 4298 - protein, 18 aa, synthetic construct
KIINGHDSPHKSGQRNYT

SEQ ID NO: 4299 - protein, 18 aa, synthetic construct
KIINGHDSPHSKAQNQQT

SEQ ID NO: 4300 - protein, 18 aa, synthetic construct
KLNPGHDSPHKSGQTQQT

SEQ ID NO: 4301 - protein, 18 aa, synthetic construct
KLNRGHDSPHKSGQNQQS

SEQ ID NO: 4302 - protein, 18 aa, synthetic construct
KLSSGHDSPHKSGQNQQN

SEQ ID NO: 4303 - protein, 18 aa, synthetic construct
KNINGHDSPHSKAQNQQT

SEQ ID NO: 4304 - protein, 18 aa, synthetic construct
KNNDGSGSPHSKAQNQQT

SEQ ID NO: 4305 - protein, 18 aa, synthetic construct
KNVMGSGSPHSKAQNQQT

SEQ ID NO: 4306 - protein, 18 aa, synthetic construct
KPINGHDSPHKSGQNKLS

SEQ ID NO: 4307 - protein, 18 aa, synthetic construct
KPINGHDSPHKSGQNLSS

SEQ ID NO: 4308 - protein, 18 aa, synthetic construct
KPINGHDSPHSKAQNQQT

SEQ ID NO: 4309 - protein, 18 aa, synthetic construct
KRINGHDSPHSKAQNQQT

SEQ ID NO: 4310 - protein, 18 aa, synthetic construct
KSCSGHDSPHKSGQNQQS

SEQ ID NO: 4311 - protein, 18 aa, synthetic construct
KSINGHDSPHKSGQNLAS

SEQ ID NO: 4312 - protein, 18 aa, synthetic construct
KSINGHDSPHKSGQNLFL

SEQ ID NO: 4313 - protein, 18 aa, synthetic construct
KSINGHDSPHKSGQNLLM

SEQ ID NO: 4314 - protein, 18 aa, synthetic construct
KSINGHDSPHKSGQNLLQ

SEQ ID NO: 4315 - protein, 18 aa, synthetic construct
KSINGHDSPHKSGQNSLG

SEQ ID NO: 4316 - protein, 18 aa, synthetic construct
KSINGHDSPHKSGQNTLQ

SEQ ID NO: 4317 - protein, 18 aa, synthetic construct
KSINGHDSPHKSSSNQQT

SEQ ID NO: 4318 - protein, 18 aa, synthetic construct
KSINGHDSPHKYKLNQQT

SEQ ID NO: 4319 - protein, 18 aa, synthetic construct
KSINGSGSPHKSGQKQQT

SEQ ID NO: 4320 - protein, 18 aa, synthetic construct
KSINGSGSPHKSGQNQQT

SEQ ID NO: 4321 - protein, 18 aa, synthetic construct
KSINGSGSPHSKAQGLST

SEQ ID NO: 4322 - protein, 18 aa, synthetic construct
KSINGSGSPHSKAQLLGT

SEQ ID NO: 4323 - protein, 18 aa, synthetic construct
KSINGSGSPHSKTSWQQT

SEQ ID NO: 4324 - protein, 18 aa, synthetic construct
KSMNGHDSPHSKAQNQQT

SEQ ID NO: 4325 - protein, 18 aa, synthetic construct
KSTLGSGSPHSKAQNQHT

SEQ ID NO: 4326 - protein, 18 aa, synthetic construct
KSTLGSGSPHSKAQNQQN

SEQ ID NO: 4327 - protein, 18 aa, synthetic construct
KSTVGSGSPHSKAQTQQT

SEQ ID NO: 4328 - protein, 18 aa, synthetic construct
KTCKESGSPHSKAQNQQT

SEQ ID NO: 4329 - protein, 18 aa, synthetic construct
KTCKGSGSPHSKAQNQQT

SEQ ID NO: 4330 - protein, 18 aa, synthetic construct
KTCKSSGSPHSKAQNQQT

SEQ ID NO: 4331 - protein, 18 aa, synthetic construct
KTDMGSGSPHSKAQNQQT

SEQ ID NO: 4332 - protein, 18 aa, synthetic construct
KTDNGIGSPHSKAQNQQT

SEQ ID NO: 4333 - protein, 18 aa, synthetic construct
KTEGGSGSPHSKAQNQQT

SEQ ID NO: 4334 - protein, 18 aa, synthetic construct
KTEHHSGSPHSKAQNQQT

SEQ ID NO: 4335 - protein, 18 aa, synthetic construct
KTEKDSGSPHSKAQNQQT

SEQ ID NO: 4336 - protein, 18 aa, synthetic construct
KTELGHDSPHKRGQNQQT

SEQ ID NO: 4337 - protein, 18 aa, synthetic construct
KTESVSGSPHSKAQNQQT

SEQ ID NO: 4338 - protein, 18 aa, synthetic construct
KTETNSGSPHSKAQNQQT

SEQ ID NO: 4339 - protein, 18 aa, synthetic construct
KTETYSGSPHSKAQNQQT

SEQ ID NO: 4340 - protein, 18 aa, synthetic construct
KTEWLSGSPHSKAQNQQT

SEQ ID NO: 4341 - protein, 18 aa, synthetic construct
KTFNGSGSPHKSGQNQQT

SEQ ID NO: 4342 - protein, 18 aa, synthetic construct
KTGLRHDSPHKSGQKQQT

SEQ ID NO: 4343 - protein, 18 aa, synthetic construct
KTGLRHDSPHKSGQNQQS

SEQ ID NO: 4344 - protein, 18 aa, synthetic construct
KTGVTHDSPHKSGQKQQT

SEQ ID NO: 4345 - protein, 18 aa, synthetic construct
KTIDGHESPHSKAQNQQT

SEQ ID NO: 4346 - protein, 18 aa, synthetic construct
KTIEGHDSPHKSGQTQQT

SEQ ID NO: 4347 - protein, 18 aa, synthetic construct
KTIHGHDSPHSKAQNQQT

SEQ ID NO: 4348 - protein, 18 aa, synthetic construct
KTIHGHESPHSKAQNQQT

SEQ ID NO: 4349 - protein, 18 aa, synthetic construct
KTIIGHDSPHKSGQNRSS

SEQ ID NO: 4350 - protein, 18 aa, synthetic construct
KTIIGHDSPHKSGQRLGT

SEQ ID NO: 4351 - protein, 18 aa, synthetic construct
KTIIGSGSPHKSGQNQQT

SEQ ID NO: 4352 - protein, 18 aa, synthetic construct
KTIKGHDSPHKSGQNMLF

SEQ ID NO: 4353 - protein, 18 aa, synthetic construct
KTILGSGSPHSKAQNLQT

SEQ ID NO: 4354 - protein, 18 aa, synthetic construct
KTINGCSSPHWKAQNQQT

SEQ ID NO: 4355 - protein, 18 aa, synthetic construct
KTINGGGSTHSKAQNQQT

SEQ ID NO: 4356 - protein, 18 aa, synthetic construct
KTINGHDSPHKAGQSQQT

SEQ ID NO: 4357 - protein, 18 aa, synthetic construct
KTINGHDSPHKRGQNVPS

SEQ ID NO: 4358 - protein, 18 aa, synthetic construct
KTINGHDSPHKRGRSYQT

SEQ ID NO: 4359 - protein, 18 aa, synthetic construct
KTINGHDSPHKTGQNPPT

SEQ ID NO: 4360 - protein, 18 aa, synthetic construct
KTINGHDSPHSKAENQQT

SEQ ID NO: 4361 - protein, 18 aa, synthetic construct
KTINGHDSPHSKALSLQT

SEQ ID NO: 4362 - protein, 18 aa, synthetic construct
KTINGHDSPHSKAQGQQT

SEQ ID NO: 4363 - protein, 18 aa, synthetic construct
KTINGHDSPHSKAQHQQT

SEQ ID NO: 4364 - protein, 18 aa, synthetic construct
KTINGHDSPHSKAQIQQT

SEQ ID NO: 4365 - protein, 18 aa, synthetic construct
KTINGHDSPHSKAQKQQT

SEQ ID NO: 4366 - protein, 18 aa, synthetic construct
KTINGHDSPHSKAQNLSS

SEQ ID NO: 4367 - protein, 18 aa, synthetic construct
KTINGHDSPHSKAQNPQT

SEQ ID NO: 4368 - protein, 18 aa, synthetic construct
KTINGHDSPHSKAQNQET

SEQ ID NO: 4369 - protein, 18 aa, synthetic construct
KTINGHDSPHSKAQNQHT

SEQ ID NO: 4370 - protein, 18 aa, synthetic construct
KTINGHDSPHSKAQNQLT

SEQ ID NO: 4371 - protein, 18 aa, synthetic construct
KTINGHDSPHSKAQNQPT

SEQ ID NO: 4372 - protein, 18 aa, synthetic construct
KTINGHDSPHSKAQNQQA

SEQ ID NO: 4373 - protein, 18 aa, synthetic construct
KTINGHDSPHSKAQNTGS

SEQ ID NO: 4374 - protein, 18 aa, synthetic construct
KTINGHDSPHSKAQSQQT

SEQ ID NO: 4375 - protein, 18 aa, synthetic construct
KTINGHDSPHSKAQTQQT

SEQ ID NO: 4376 - protein, 18 aa, synthetic construct
KTINGHDSPHSKAQYQQT

SEQ ID NO: 4377 - protein, 18 aa, synthetic construct
KTINGHDSPHSKARNQQT

SEQ ID NO: 4378 - protein, 18 aa, synthetic construct
KTINGHDSPHSKLPGQQT

SEQ ID NO: 4379 - protein, 18 aa, synthetic construct
KTINGHDSPHSKSPNQQT

SEQ ID NO: 4380 - protein, 18 aa, synthetic construct
KTINGHESPHKSGQNAFL

SEQ ID NO: 4381 - protein, 18 aa, synthetic construct
KTINGIGSPHSKAPNEQT

SEQ ID NO: 4382 - protein, 18 aa, synthetic construct
KTINGQDSPHKSGQNLHM

SEQ ID NO: 4383 - protein, 18 aa, synthetic construct
KTINGRGSPHSKAQIGMT

SEQ ID NO: 4384 - protein, 18 aa, synthetic construct
KTINGRGSPHSKAQNQVL

SEQ ID NO: 4385 - protein, 18 aa, synthetic construct
KTINGRGSPHSKAQSPTT

SEQ ID NO: 4386 - protein, 18 aa, synthetic construct
KTINGRGSPHSKATSFQT

SEQ ID NO: 4387 - protein, 18 aa, synthetic construct
KTINGSGSPHFVVQNQQT

SEQ ID NO: 4388 - protein, 18 aa, synthetic construct
KTINGSGSPHKRGQKQQT

SEQ ID NO: 4389 - protein, 18 aa, synthetic construct
KTINGSGSPHKRGQNQET

SEQ ID NO: 4390 - protein, 18 aa, synthetic construct
KTINGSGSPHKRGQNQLT

SEQ ID NO: 4391 - protein, 18 aa, synthetic construct
KTINGSGSPHKRGRNQQT

SEQ ID NO: 4392 - protein, 18 aa, synthetic construct
KTINGSGSPHKSGGNQQT

SEQ ID NO: 4393 - protein, 18 aa, synthetic construct
KTINGSGSPHKSGHNQET

SEQ ID NO: 4394 - protein, 18 aa, synthetic construct
KTINGSGSPHKSGHNQLT

SEQ ID NO: 4395 - protein, 18 aa, synthetic construct
KTINGSGSPHKSGHNQQN

SEQ ID NO: 4396 - protein, 18 aa, synthetic construct
KTINGSGSPHKSGLNQLT

SEQ ID NO: 4397 - protein, 18 aa, synthetic construct
KTINGSGSPHKSGPNQQT

SEQ ID NO: 4398 - protein, 18 aa, synthetic construct
KTINGSGSPHKSGQGQQT

SEQ ID NO: 4399 - protein, 18 aa, synthetic construct
KTINGSGSPHKSGQHLQT

SEQ ID NO: 4400 - protein, 18 aa, synthetic construct
KTINGSGSPHKSGQHQQT

SEQ ID NO: 4401 - protein, 18 aa, synthetic construct
KTINGSGSPHKSGQKHQT

SEQ ID NO: 4402 - protein, 18 aa, synthetic construct
KTINGSGSPHKSGQKQQS

SEQ ID NO: 4403 - protein, 18 aa, synthetic construct
KTINGSGSPHKSGQNEQT

SEQ ID NO: 4404 - protein, 18 aa, synthetic construct
KTINGSGSPHKSGQNHQT

SEQ ID NO: 4405 - protein, 18 aa, synthetic construct
KTINGSGSPHKSGQNKQT

SEQ ID NO: 4406 - protein, 18 aa, synthetic construct
KTINGSGSPHKSGQNKTS

SEQ ID NO: 4407 - protein, 18 aa, synthetic construct
KTINGSGSPHKSGQNQEA

SEQ ID NO: 4408 - protein, 18 aa, synthetic construct
KTINGSGSPHKSGQNQET

SEQ ID NO: 4409 - protein, 18 aa, synthetic construct
KTINGSGSPHKSGQNQKT

SEQ ID NO: 4410 - protein, 18 aa, synthetic construct
KTINGSGSPHKSGQNQQI

SEQ ID NO: 4411 - protein, 18 aa, synthetic construct
KTINGSGSPHKSGQNQQR

SEQ ID NO: 4412 - protein, 18 aa, synthetic construct
KTINGSGSPHKSGQNQRT

SEQ ID NO: 4413 - protein, 18 aa, synthetic construct
KTINGSGSPHKSGQNQYT

SEQ ID NO: 4414 - protein, 18 aa, synthetic construct
KTINGSGSPHKSGQRQQT

SEQ ID NO: 4415 - protein, 18 aa, synthetic construct
KTINGSGSPHKSGQSQQT

SEQ ID NO: 4416 - protein, 18 aa, synthetic construct
KTINGSGSPHKSGQYQRT

SEQ ID NO: 4417 - protein, 18 aa, synthetic construct
KTINGSGSPHKSGRNQQA

SEQ ID NO: 4418 - protein, 18 aa, synthetic construct
KTINGSGSPHKSRHNQQT

SEQ ID NO: 4419 - protein, 18 aa, synthetic construct
KTINGSGSPHKSRQYQQT

SEQ ID NO: 4420 - protein, 18 aa, synthetic construct
KTINGSGSPHRKAQAPGT

SEQ ID NO: 4421 - protein, 18 aa, synthetic construct
KTINGSGSPHSKAAMKQT

SEQ ID NO: 4422 - protein, 18 aa, synthetic construct
KTINGSGSPHSKAGRQQT

SEQ ID NO: 4423 - protein, 18 aa, synthetic construct
KTINGSGSPHSKAGRTQT

SEQ ID NO: 4424 - protein, 18 aa, synthetic construct
KTINGSGSPHSKAKSNQT

SEQ ID NO: 4425 - protein, 18 aa, synthetic construct
KTINGSGSPHSKALKTQT

SEQ ID NO: 4426 - protein, 18 aa, synthetic construct
KTINGSGSPHSKAPRTQT

SEQ ID NO: 4427 - protein, 18 aa, synthetic construct
KTINGSGSPHSKAQAART

SEQ ID NO: 4428 - protein, 18 aa, synthetic construct
KTINGSGSPHSKAQAILT

SEQ ID NO: 4429 - protein, 18 aa, synthetic construct
KTINGSGSPHSKAQCRGT

SEQ ID NO: 4430 - protein, 18 aa, synthetic construct
KTINGSGSPHSKAQGLRT

SEQ ID NO: 4431 - protein, 18 aa, synthetic construct
KTINGSGSPHSKAQKGVL

SEQ ID NO: 4432 - protein, 18 aa, synthetic construct
KTINGSGSPHSKAQKSNT

SEQ ID NO: 4433 - protein, 18 aa, synthetic construct
KTINGSGSPHSKAQNNKF

SEQ ID NO: 4434 - protein, 18 aa, synthetic construct
KTINGSGSPHSKAQNRRT

SEQ ID NO: 4435 - protein, 18 aa, synthetic construct
KTINGSGSPHSKAQPKQT

SEQ ID NO: 4436 - protein, 18 aa, synthetic construct
KTINGSGSPHSKAQRAPT

SEQ ID NO: 4437 - protein, 18 aa, synthetic construct
KTINGSGSPHSKAQREHT

SEQ ID NO: 4438 - protein, 18 aa, synthetic construct
KTINGSGSPHSKAQRFGT

SEQ ID NO: 4439 - protein, 18 aa, synthetic construct
KTINGSGSPHSKAQRPCT

SEQ ID NO: 4440 - protein, 18 aa, synthetic construct
KTINGSGSPHSKAQRQAT

SEQ ID NO: 4441 - protein, 18 aa, synthetic construct
KTINGSGSPHSKAQRQPT

SEQ ID NO: 4442 - protein, 18 aa, synthetic construct
KTINGSGSPHSKAQTKLT

SEQ ID NO: 4443 - protein, 18 aa, synthetic construct
KTINGSGSPHSKAQTTHT

SEQ ID NO: 4444 - protein, 18 aa, synthetic construct
KTINGSGSPHSKAQVQRT

SEQ ID NO: 4445 - protein, 18 aa, synthetic construct
KTINGSGSPHSKAQVVRT

SEQ ID NO: 4446 - protein, 18 aa, synthetic construct
KTINGSGSPHSKAQWPNT

SEQ ID NO: 4447 - protein, 18 aa, synthetic construct
KTINGSGSPHSKAQYPST

SEQ ID NO: 4448 - protein, 18 aa, synthetic construct
KTINGSGSPHSKARALQT

SEQ ID NO: 4449 - protein, 18 aa, synthetic construct
KTINGSGSPHSKARDQHT

SEQ ID NO: 4450 - protein, 18 aa, synthetic construct
KTINGSGSPHSKARFQQT

SEQ ID NO: 4451 - protein, 18 aa, synthetic construct
KTINGSGSPHSKARRTQT

SEQ ID NO: 4452 - protein, 18 aa, synthetic construct
KTINGSGSPHSKARSLQT

SEQ ID NO: 4453 - protein, 18 aa, synthetic construct
KTINGSGSPHSKARVIQT

SEQ ID NO: 4454 - protein, 18 aa, synthetic construct
KTINGSGSPHSKAWYLQT

SEQ ID NO: 4455 - protein, 18 aa, synthetic construct
KTINGSGSPHSKGGGQQT

SEQ ID NO: 4456 - protein, 18 aa, synthetic construct
KTINGSGSPHSKGSRQQT

SEQ ID NO: 4457 - protein, 18 aa, synthetic construct
KTINGSGSPHSKLQRQQT

SEQ ID NO: 4458 - protein, 18 aa, synthetic construct
KTINGSGSPHSKMLRQQT

SEQ ID NO: 4459 - protein, 18 aa, synthetic construct
KTINGSGSPHSKSSIKQT

SEQ ID NO: 4460 - protein, 18 aa, synthetic construct
KTINGSGSPHSKVRFQQT

SEQ ID NO: 4461 - protein, 18 aa, synthetic construct
KTINGSGSPHSVVWNQQT

SEQ ID NO: 4462 - protein, 18 aa, synthetic construct
KTINGSTSPHKLAQNQQP

SEQ ID NO: 4463 - protein, 18 aa, synthetic construct
KTINRHDSPHKSGQRPST

SEQ ID NO: 4464 - protein, 18 aa, synthetic construct
KTINRIMSPHSKAQNQQT

SEQ ID NO: 4465 - protein, 18 aa, synthetic construct
KTINTARSPHSKAQNQQT

SEQ ID NO: 4466 - protein, 18 aa, synthetic construct
KTISGHDSPHSKAQNQQT

SEQ ID NO: 4467 - protein, 18 aa, synthetic construct
KTISGSGSPHKSGQNQQT

SEQ ID NO: 4468 - protein, 18 aa, synthetic construct
KTITGHDSPHKSGQRLGT

SEQ ID NO: 4469 - protein, 18 aa, synthetic construct
KTITGSGSPHKSGQNQQT

SEQ ID NO: 4470 - protein, 18 aa, synthetic construct
KTIYGHDSPHKSGQRLGT

SEQ ID NO: 4471 - protein, 18 aa, synthetic construct
KTLNGHDSPHKSGQNLFL

SEQ ID NO: 4472 - protein, 18 aa, synthetic construct
KTLNGHDSPHKSGQNLSS

SEQ ID NO: 4473 - protein, 18 aa, synthetic construct
KTLSFHDSPHKSGQNQQS

SEQ ID NO: 4474 - protein, 18 aa, synthetic construct
KTSNGSGSPHSKAQNTMT

SEQ ID NO: 4475 - protein, 18 aa, synthetic construct
KTTNGHDSPHSKAQNQQT

SEQ ID NO: 4476 - protein, 18 aa, synthetic construct
KTVNGGGSPHSKAQNQQT

SEQ ID NO: 4477 - protein, 18 aa, synthetic construct
KTVNGHDSPHKSGQNVSL

SEQ ID NO: 4478 - protein, 18 aa, synthetic construct
KTVNGHDSPHKSGQRPST

SEQ ID NO: 4479 - protein, 18 aa, synthetic construct
KTVNGHDSPHKSGQTQQA

SEQ ID NO: 4480 - protein, 18 aa, synthetic construct
KTVNGHESPHSKAQNQQT

SEQ ID NO: 4481 - protein, 18 aa, synthetic construct
KTVNGSGSPHSKAQGLST

SEQ ID NO: 4482 - protein, 18 aa, synthetic construct
KTVNGSGSPHSKAQNVTS

SEQ ID NO: 4483 - protein, 18 aa, synthetic construct
KTVPASGSPHSKAQNQQT

SEQ ID NO: 4484 - protein, 18 aa, synthetic construct
NTINGSGSPHSKAHNQQT

SEQ ID NO: 4485 - protein, 18 aa, synthetic construct
TTINGGGSPHSKAQNQQT

SEQ ID NO: 4486 - protein, 8 aa, synthetic construct
HDSPHSKA

SEQ ID NO: 4487 - protein, 9 aa, synthetic construct
GHDSPHKSQ

SEQ ID NO: 4488 - protein, 9 aa, synthetic construct
GNDSPHKIG

SEQ ID NO: 4489 - protein, 9 aa, synthetic construct
GHDSPHKSK

SEQ ID NO: 4490 - protein, 9 aa, synthetic construct
GHDSPHKLW

SEQ ID NO: 4491 - protein, 9 aa, synthetic construct
GHPSPHWKG

SEQ ID NO: 4492 - protein, 9 aa, synthetic construct
GHDSPHKMG

SEQ ID NO: 4493 - protein, 9 aa, synthetic construct
GHDSPHKMA

SEQ ID NO: 4494 - protein, 9 aa, synthetic construct
GHSSPHRSG

SEQ ID NO: 4495 - protein, 8 aa, synthetic construct
SGSPHKYG

SEQ ID NO: 4496 - protein, 4 aa, synthetic construct
QNQQ

SEQ ID NO: 4497 - protein, 4 aa, synthetic construct
WNQQ

SEQ ID NO: 4498 - protein, 4 aa, synthetic construct
QYYV

SEQ ID NO: 4499 - protein, 4 aa, synthetic construct
RRQQ

SEQ ID NO: 4500 - protein, 742 aa, synthetic construct
MAADGYLPDWLEDNLSEGIREWWALKPGAPQPKANQQHQDNARGLVLPGYKYLGPGNGLDKGEPVNAADAAALEHDKAYDQQLKAGDNPYLKYNHADAEFQERLKEDTSFGGNLGRAVFQAKKRLLEPLGLVEEAAKTAPGKKRPVEQSPQEPDSSAGIGKSGAQPAKKRLNFGQTGDTESVPDPQPIGEPPAAPSGVGSLTMASGGGAPVADNNEGADGVGSSSGNWHCDSQWLGDRVITTSTRTWALPTYNNHLYKQISNSTSGGSSNDNAYFGYSTPWGYFDFNRFHCHFSPRDWQRLINNNWGFRPKRLNFKLFNIQVKEVTDNNGVKTIANNLTSTVQVFTDSDYQLPYVLGSAHEGCLPPFPADVFMIPQYGYLTLNDGSQAVGRSSFYCLEYFPSQMLRTGNNFQFSYEFENVPFHSSYAHSQSLDRLMNPLIDQYLYYLSKTENVSGSPHSKAQNQQTLKFSVAGPSNMAVQGRNYIPGPSYRQQRVSTTVTQNNNSEFAWPGASSWALNGRNSLMNPGPAMASHKEGEDRFFPLSGSLIFGKQGTGRDNVDADKVMITNEEEIKTTNPVATESYGQVATNHQSAQAQAQTGWVQNQGILPGMVWQDRDVYLQGPIWAKIPHTDGNFHPSPLMGGFGMKHPPPQILIKNTPVPADPPTAFNKDKLNSFITQYSTGQVSVEIEWELQKENSKRWNPEIQYTSNYYKSNNVEFAVNTEGVYSEPRPIGTRYLTRNL

SEQ ID NO: 4501 - protein, 742 aa, synthetic construct
MAADGYLPDWLEDNLSEGIREWWALKPGAPQPKANQQHQDNARGLVLPGYKYLGPGNGLDKGEPVNAADAAALEHDKAYDQQLKAGDNPYLKYNHADAEFQERLKEDTSFGGNLGRAVFQAKKRLLEPLGLVEEAAKTAPGKKRPVEQSPQEPDSSAGIGKSGAQPAKKRLNFGQTGDTESVPDPQPIGEPPAAPSGVGSLTMASGGGAPVADNNEGADGVGSSSGNWHCDSQWLGDRVITTSTRTWALPTYNNHLYKQISNSTSGGSSNDNAYFGYSTPWGYFDFNRFHCHFSPRDWQRLINNNWGFRPKRLNFKLFNIQVKEVTDNNGVKTIANNLTSTVQVFTDSDYQLPYVLGSAHEGCLPPFPADVFMIPQYGYLTLNDGSQAVGRSSFYCLEYFPSQMLRTGNNFQFSYEFENVPFHSSYAHSQSLDRLMNPLIDQYLYYLSKTEKVSGSPHSKAQNQQTLKFSVAGPSNMAVQGRNYIPGPSYRQQRVSTTVTQNNNSEFAWPGASSWALNGRNSLMNPGPAMASHKEGEDRFFPLSGSLIFGKQGTGRDNVDADKVMITNEEEIKTTNPVATESYGQVATNHQSAQAQAQTGWVQNQGILPGMVWQDRDVYLQGPIWAKIPHTDGNFHPSPLMGGFGMKHPPPQILIKNTPVPADPPTAFNKDKLNSFITQYSTGQVSVEIEWELQKENSKRWNPEIQYTSNYYKSNNVEFAVNTEGVYSEPRPIGTRYLTRNL

SEQ ID NO: 4502 - protein, 742 aa, synthetic construct
MAADGYLPDWLEDNLSEGIREWWALKPGAPQPKANQQHQDNARGLVLPGYKYLGPGNGLDKGEPVNAADAAALEHDKAYDQQLKAGDNPYLKYNHADAEFQERLKEDTSFGGNLGRAVFQAKKRLLEPLGLVEEAAKTAPGKKRPVEQSPQEPDSSAGIGKSGAQPAKKRLNFGQTGDTESVPDPQPIGEPPAAPSGVGSLTMASGGGAPVADNNEGADGVGSSSGNWHCDSQWLGDRVITTSTRTWALPTYNNHLYKQISNSTSGGSSNDNAYFGYSTPWGYFDFNRFHCHFSPRDWQRLINNNWGFRPKRLNFKLFNIQVKEVTDNNGVKTIANNLTSTVQVFTDSDYQLPYVLGSAHEGCLPPFPADVFMIPQYGYLTLNDGSQAVGRSSFYCLEYFPSQMLRTGNNFQFSYEFENVPFHSSYAHSQSLDRLMNPLIDQYLYYLSKTINGSGSPHKSGQNKTSLKFSVAGPSNMAVQGRNYIPGPSYRQQRVSTTVTQNNNSEFAWPGASSWALNGRNSLMNPGPAMASHKEGEDRFFPLSGSLIFGKQGTGRDNVDADKVMITNEEEIKTTNPVATESYGQVATNHQSAQAQAQTGWVQNQGILPGMVWQDRDVYLQGPIWAKIPHTDGNFHPSPLMGGFGMKHPPPQILIKNTPVPADPPTAFNKDKLNSFITQYSTGQVSVEIEWELQKENSKRWNPEIQYTSNYYKSNNVEFAVNTEGVYSEPRPIGTRYLTRNL

SEQ ID NO: 4503 - protein, 742 aa, synthetic construct
MAADGYLPDWLEDNLSEGIREWWALKPGAPQPKANQQHQDNARGLVLPGYKYLGPGNGLDKGEPVNAADAAALEHDKAYDQQLKAGDNPYLKYNHADAEFQERLKEDTSFGGNLGRAVFQAKKRLLEPLGLVEEAAKTAPGKKRPVEQSPQEPDSSAGIGKSGAQPAKKRLNFGQTGDTESVPDPQPIGEPPAAPSGVGSLTMASGGGAPVADNNEGADGVGSSSGNWHCDSQWLGDRVITTSTRTWALPTYNNHLYKQISNSTSGGSSNDNAYFGYSTPWGYFDFNRFHCHFSPRDWQRLINNNWGFRPKRLNFKLFNIQVKEVTDNNGVKTIANNLTSTVQVFTDSDYQLPYVLGSAHEGCLPPFPADVFMIPQYGYLTLNDGSQAVGRSSFYCLEYFPSQMLRTGNNFQFSYEFENVPFHSSYAHSQSLDRLMNPLIDQYLYYLSKTSNASGSPHSKAHNQQTLKFSVAGPSNMAVQGRNYIPGPSYRQQRVSTTVTQNNNSEFAWPGASSWALNGRNSLMNPGPAMASHKEGEDRFFPLSGSLIFGKQGTGRDNVDADKVMITNEEEIKTTNPVATESYGQVATNHQSAQAQAQTGWVQNQGILPGMVWQDRDVYLQGPIWAKIPHTDGNFHPSPLMGGFGMKHPPPQILIKNTPVPADPPTAFNKDKLNSFITQYSTGQVSVEIEWELQKENSKRWNPEIQYTSNYYKSNNVEFAVNTEGVYSEPRPIGTRYLTRNL

SEQ ID NO: 4504 - protein, 742 aa, synthetic construct
MAADGYLPDWLEDNLSEGIREWWALKPGAPQPKANQQHQDNARGLVLPGYKYLGPGNGLDKGEPVNAADAAALEHDKAYDQQLKAGDNPYLKYNHADAEFQERLKEDTSFGGNLGRAVFQAKKRLLEPLGLVEEAAKTAPGKKRPVEQSPQEPDSSAGIGKSGAQPAKKRLNFGQTGDTESVPDPQPIGEPPAAPSGVGSLTMASGGGAPVADNNEGADGVGSSSGNWHCDSQWLGDRVITTSTRTWALPTYNNHLYKQISNSTSGGSSNDNAYFGYSTPWGYFDFNRFHCHFSPRDWQRLINNNWGFRPKRLNFKLFNIQVKEVTDNNGVKTIANNLTSTVQVFTDSDYQLPYVLGSAHEGCLPPFPADVFMIPQYGYLTLNDGSQAVGRSSFYCLEYFPSQMLRTGNNFQFSYEFENVPFHSSYAHSQSLDRLMNPLIDQYLYYLSKNSIGSGSPHSKAQNQQTLKFSVAGPSNMAVQGRNYIPGPSYRQQRVSTTVTQNNNSEFAWPGASSWALNGRNSLMNPGPAMASHKEGEDRFFPLSGSLIFGKQGTGRDNVDADKVMITNEEEIKTTNPVATESYGQVATNHQSAQAQAQTGWVQNQGILPGMVWQDRDVYLQGPIWAKIPHTDGNFHPSPLMGGFGMKHPPPQILIKNTPVPADPPTAFNKDKLNSFITQYSTGQVSVEIEWELQKENSKRWNPEIQYTSNYYKSNNVEFAVNTEGVYSEPRPIGTRYLTRNL

SEQ ID NO: 4505 - protein, 742 aa, synthetic construct
MAADGYLPDWLEDNLSEGIREWWALKPGAPQPKANQQHQDNARGLVLPGYKYLGPGNGLDKGEPVNAADAAALEHDKAYDQQLKAGDNPYLKYNHADAEFQERLKEDTSFGGNLGRAVFQAKKRLLEPLGLVEEAAKTAPGKKRPVEQSPQEPDSSAGIGKSGAQPAKKRLNFGQTGDTESVPDPQPIGEPPAAPSGVGSLTMASGGGAPVADNNEGADGVGSSSGNWHCDSQWLGDRVITTSTRTWALPTYNNHLYKQISNSTSGGSSNDNAYFGYSTPWGYFDFNRFHCHFSPRDWQRLINNNWGFRPKRLNFKLFNIQVKEVTDNNGVKTIANNLTSTVQVFTDSDYQLPYVLGSAHEGCLPPFPADVFMIPQYGYLTLNDGSQAVGRSSFYCLEYFPSQMLRTGNNFQFSYEFENVPFHSSYAHSQSLDRLMNPLIDQYLYYLSKTVNGHDSPHKSGQRPSTLKFSVAGPSNMAVQGRNYIPGPSYRQQRVSTTVTQNNNSEFAWPGASSWALNGRNSLMNPGPAMASHKEGEDRFFPLSGSLIFGKQGTGRDNVDADKVMITNEEEIKTTNPVATESYGQVATNHQSAQAQAQTGWVQNQGILPGMVWQDRDVYLQGPIWAKIPHTDGNFHPSPLMGGFGMKHPPPQILIKNTPVPADPPTAFNKDKLNSFITQYSTGQVSVEIEWELQKENSKRWNPEIQYTSNYYKSNNVEFAVNTEGVYSEPRPIGTRYLTRNL

SEQ ID NO: 4506 - protein, 742 aa, synthetic construct
MAADGYLPDWLEDNLSEGIREWWALKPGAPQPKANQQHQDNARGLVLPGYKYLGPGNGLDKGEPVNAADAAALEHDKAYDQQLKAGDNPYLKYNHADAEFQERLKEDTSFGGNLGRAVFQAKKRLLEPLGLVEEAAKTAPGKKRPVEQSPQEPDSSAGIGKSGAQPAKKRLNFGQTGDTESVPDPQPIGEPPAAPSGVGSLTMASGGGAPVADNNEGADGVGSSSGNWHCDSQWLGDRVITTSTRTWALPTYNNHLYKQISNSTSGGSSNDNAYFGYSTPWGYFDFNRFHCHFSPRDWQRLINNNWGFRPKRLNFKLFNIQVKEVTDNNGVKTIANNLTSTVQVFTDSDYQLPYVLGSAHEGCLPPFPADVFMIPQYGYLTLNDGSQAVGRSSFYCLEYFPSQMLRTGNNFQFSYEFENVPFHSSYAHSQSLDRLMNPLIDQYLYYLSKAENGSGSPHSKAQNQQTLKFSVAGPSNMAVQGRNYIPGPSYRQQRVSTTVTQNNNSEFAWPGASSWALNGRNSLMNPGPAMASHKEGEDRFFPLSGSLIFGKQGTGRDNVDADKVMITNEEEIKTTNPVATESYGQVATNHQSAQAQAQTGWVQNQGILPGMVWQDRDVYLQGPIWAKIPHTDGNFHPSPLMGGFGMKHPPPQILIKNTPVPADPPTAFNKDKLNSFITQYSTGQVSVEIEWELQKENSKRWNPEIQYTSNYYKSNNVEFAVNTEGVYSEPRPIGTRYLTRNL

SEQ ID NO: 4507 - protein, 742 aa, synthetic construct
MAADGYLPDWLEDNLSEGIREWWALKPGAPQPKANQQHQDNARGLVLPGYKYLGPGNGLDKGEPVNAADAAALEHDKAYDQQLKAGDNPYLKYNHADAEFQERLKEDTSFGGNLGRAVFQAKKRLLEPLGLVEEAAKTAPGKKRPVEQSPQEPDSSAGIGKSGAQPAKKRLNFGQTGDTESVPDPQPIGEPPAAPSGVGSLTMASGGGAPVADNNEGADGVGSSSGNWHCDSQWLGDRVITTSTRTWALPTYNNHLYKQISNSTSGGSSNDNAYFGYSTPWGYFDFNRFHCHFSPRDWQRLINNNWGFRPKRLNFKLFNIQVKEVTDNNGVKTIANNLTSTVQVFTDSDYQLPYVLGSAHEGCLPPFPADVFMIPQYGYLTLNDGSQAVGRSSFYCLEYFPSQMLRTGNNFQFSYEFENVPFHSSYAHSQSLDRLMNPLIDQYLYYLSKTINGSGSPHKSGQNQQPLKFSVAGPSNMAVQGRNYIPGPSYRQQRVSTTVTQNNNSEFAWPGASSWALNGRNSLMNPGPAMASHKEGEDRFFPLSGSLIFGKQGTGRDNVDADKVMITNEEEIKTTNPVATESYGQVATNHQSAQAQAQTGWVQNQGILPGMVWQDRDVYLQGPIWAKIPHTDGNFHPSPLMGGFGMKHPPPQILIKNTPVPADPPTAFNKDKLNSFITQYSTGQVSVEIEWELQKENSKRWNPEIQYTSNYYKSNNVEFAVNTEGVYSEPRPIGTRYLTRNL

SEQ ID NO: 4508 - protein, 4 aa, synthetic construct
GCGQ

SEQ ID NO: 4509 - protein, 4 aa, synthetic construct
LRQQ

SEQ ID NO: 4510 - protein, 4 aa, synthetic construct
RNQQ

SEQ ID NO: 4511 - protein, 4 aa, synthetic construct
VNQQ

SEQ ID NO: 4512 - protein, 4 aa, synthetic construct
FRLQ

SEQ ID NO: 4513 - protein, 4 aa, synthetic construct
FNQQ

SEQ ID NO: 4514 - protein, 4 aa, synthetic construct
LLQQ

SEQ ID NO: 4515 - protein, 4 aa, synthetic construct
SNQQ

SEQ ID NO: 4516 - protein, 4 aa, synthetic construct
RLQQ

SEQ ID NO: 4517 - protein, 4 aa, synthetic construct
LNQQ

SEQ ID NO: 4518 - protein, 4 aa, synthetic construct
QRKL

SEQ ID NO: 4519 - protein, 4 aa, synthetic construct
LRRQ

SEQ ID NO: 4520 - protein, 4 aa, synthetic construct
QRLR

SEQ ID NO: 4521 - protein, 4 aa, synthetic construct
QRRL

SEQ ID NO: 4522 - protein, 4 aa, synthetic construct
RRLQ

SEQ ID NO: 4523 - protein, 4 aa, synthetic construct
RLRQ

SEQ ID NO: 4524 - protein, 4 aa, synthetic construct
SKRQ

SEQ ID NO: 4525 - protein, 4 aa, synthetic construct
QLYR

SEQ ID NO: 4526 - protein, 4 aa, synthetic construct
QLTV

SEQ ID NO: 4527 - protein, 4 aa, synthetic construct
QNKQ

SEQ ID NO: 4528 - protein, 4 aa, synthetic construct
KNQQ

SEQ ID NO: 4529 - protein, 4 aa, synthetic construct
QKQQ

SEQ ID NO: 4530 - protein, 4 aa, synthetic construct
QTQQ

SEQ ID NO: 4531 - protein, 4 aa, synthetic construct
QNHQ

SEQ ID NO: 4532 - protein, 4 aa, synthetic construct
QHQQ

SEQ ID NO: 4533 - protein, 4 aa, synthetic construct
QNQH

SEQ ID NO: 4534 - protein, 4 aa, synthetic construct
QHRQ

SEQ ID NO: 4535 - protein, 5 aa, synthetic construct
GGGGS

SEQ ID NO: 4536 - protein, 4 aa, synthetic construct
LTQQ

SEQ ID NO: 4537 - protein, 15 aa, synthetic construct
GGGGSGGGGSGGGGS

SEQ ID NO: 4538 - protein, 25 aa, synthetic construct
GGGGSGGGGSGGGGSGGGGSGGGGS

SEQ ID NO: 4539 - protein, 10 aa, synthetic construct
GGGGSGGGGS

SEQ ID NO: 4540 - protein, 20 aa, synthetic construct
GGGGSGGGGSGGGGSGGGGS

SEQ ID NO: 4541 - protein, 4 aa, synthetic construct
QNQW

SEQ ID NO: 4542 - protein, 4 aa, synthetic construct
QNTH

SEQ ID NO: 4543 - protein, 4 aa, synthetic construct
RRRQ

SEQ ID NO: 4544 - protein, 4 aa, synthetic construct
QYQQ

SEQ ID NO: 4545 - protein, 4 aa, synthetic construct
KDEL

SEQ ID NO: 4546 - protein, 4 aa, synthetic construct
QNDQ

SEQ ID NO: 4547 - protein, 4 aa, synthetic construct
QNRH

SEQ ID NO: 4548 - protein, 4 aa, synthetic construct
RDQQ

SEQ ID NO: 4549 - protein, 4 aa, synthetic construct
PNLQ

SEQ ID NO: 4550 - protein, 4 aa, synthetic construct
HVRQ

SEQ ID NO: 4551 - protein, 4 aa, synthetic construct
PNQH

SEQ ID NO: 4552 - protein, 4 aa, synthetic construct
HNQQ

SEQ ID NO: 4553 - protein, 4 aa, synthetic construct
QSQQ

SEQ ID NO: 4554 - protein, 4 aa, synthetic construct
QPAK

SEQ ID NO: 4555 - protein, 4 aa, synthetic construct
QNLA

SEQ ID NO: 4556 - protein, 4 aa, synthetic construct
QNQL

SEQ ID NO: 4557 - protein, 4 aa, synthetic construct
QGQQ

SEQ ID NO: 4558 - protein, 4 aa, synthetic construct
LNRQ

SEQ ID NO: 4559 - protein, 4 aa, synthetic construct
QNPP

SEQ ID NO: 4560 - protein, 4 aa, synthetic construct
QNLQ

SEQ ID NO: 4561 - protein, 4 aa, synthetic construct
QDQE

SEQ ID NO: 4562 - protein, 4 aa, synthetic construct
QDQQ

SEQ ID NO: 4563 - protein, 4 aa, synthetic construct
HWQQ

SEQ ID NO: 4564 - protein, 4 aa, synthetic construct
PNQQ

SEQ ID NO: 4565 - protein, 4 aa, synthetic construct
PEQQ

SEQ ID NO: 4566 - protein, 4 aa, synthetic construct
QRTM

SEQ ID NO: 4567 - protein, 4 aa, synthetic construct
LHQH

SEQ ID NO: 4568 - protein, 4 aa, synthetic construct
QHRI

SEQ ID NO: 4569 - protein, 4 aa, synthetic construct
QYIH

SEQ ID NO: 4570 - protein, 4 aa, synthetic construct
QKFE

SEQ ID NO: 4571 - protein, 4 aa, synthetic construct
QFPS

SEQ ID NO: 4572 - protein, 4 aa, synthetic construct
QNPL

SEQ ID NO: 4573 - protein, 4 aa, synthetic construct
QAIK

SEQ ID NO: 4574 - protein, 4 aa, synthetic construct
QNRQ

SEQ ID NO: 4575 - protein, 4 aa, synthetic construct
QYQH

SEQ ID NO: 4576 - protein, 4 aa, synthetic construct
QNPQ

SEQ ID NO: 4577 - protein, 4 aa, synthetic construct
QHQL

SEQ ID NO: 4578 - protein, 4 aa, synthetic construct
QSPP

SEQ ID NO: 4579 - protein, 4 aa, synthetic construct
QAKL

SEQ ID NO: 4580 - protein, 4 aa, synthetic construct
KSQQ

SEQ ID NO: 4581 - protein, 4 aa, synthetic construct
QDRP

SEQ ID NO: 4582 - protein, 4 aa, synthetic construct
QNLG

SEQ ID NO: 4583 - protein, 4 aa, synthetic construct
QAFH

SEQ ID NO: 4584 - protein, 4 aa, synthetic construct
QNAQ

SEQ ID NO: 4585 - protein, 4 aa, synthetic construct
HNQL

SEQ ID NO: 4586 - protein, 4 aa, synthetic construct
QKLN

SEQ ID NO: 4587 - protein, 4 aa, synthetic construct
QNVQ

SEQ ID NO: 4588 - protein, 4 aa, synthetic construct
QAQQ

SEQ ID NO: 4589 - protein, 4 aa, synthetic construct
QTPP

SEQ ID NO: 4590 - protein, 4 aa, synthetic construct
QPPA

SEQ ID NO: 4591 - protein, 4 aa, synthetic construct
QERP

SEQ ID NO: 4592 - protein, 4 aa, synthetic construct
QDLQ

SEQ ID NO: 4593 - protein, 4 aa, synthetic construct
QAMH

SEQ ID NO: 4594 - protein, 4 aa, synthetic construct
QHPS

SEQ ID NO: 4595 - protein, 4 aa, synthetic construct
PGLQ

SEQ ID NO: 4596 - protein, 4 aa, synthetic construct
QGIR

SEQ ID NO: 4597 - protein, 4 aa, synthetic construct
QAPA

SEQ ID NO: 4598 - protein, 4 aa, synthetic construct
QIPP

SEQ ID NO: 4599 - protein, 4 aa, synthetic construct
QTQL

SEQ ID NO: 4600 - protein, 4 aa, synthetic construct
QAPS

SEQ ID NO: 4601 - protein, 4 aa, synthetic construct
QNTY

SEQ ID NO: 4602 - protein, 4 aa, synthetic construct
QDKQ

SEQ ID NO: 4603 - protein, 4 aa, synthetic construct
QNHL

SEQ ID NO: 4604 - protein, 4 aa, synthetic construct
QIGM

SEQ ID NO: 4605 - protein, 4 aa, synthetic construct
LNKQ

SEQ ID NO: 4606 - protein, 4 aa, synthetic construct
PNQL

SEQ ID NO: 4607 - protein, 4 aa, synthetic construct
QLQQ

SEQ ID NO: 4608 - protein, 4 aa, synthetic construct
QRMS

SEQ ID NO: 4609 - protein, 4 aa, synthetic construct
QGIL

SEQ ID NO: 4610 - protein, 4 aa, synthetic construct
QDRQ

SEQ ID NO: 4611 - protein, 4 aa, synthetic construct
RDWQ

SEQ ID NO: 4612 - protein, 4 aa, synthetic construct
QERS

SEQ ID NO: 4613 - protein, 4 aa, synthetic construct
QNYQ

SEQ ID NO: 4614 - protein, 4 aa, synthetic construct
QRTC

SEQ ID NO: 4615 - protein, 4 aa, synthetic construct
QIGH

SEQ ID NO: 4616 - protein, 4 aa, synthetic construct
QGAI

SEQ ID NO: 4617 - protein, 4 aa, synthetic construct
QVPP

SEQ ID NO: 4618 - protein, 4 aa, synthetic construct
QVQQ

SEQ ID NO: 4619 - protein, 4 aa, synthetic construct
LMRQ

SEQ ID NO: 4620 - protein, 4 aa, synthetic construct
QYSV

SEQ ID NO: 4621 - protein, 4 aa, synthetic construct
QAIT

SEQ ID NO: 4622 - protein, 4 aa, synthetic construct
QKTL

SEQ ID NO: 4623 - protein, 4 aa, synthetic construct
QLHH

SEQ ID NO: 4624 - protein, 4 aa, synthetic construct
QNII

SEQ ID NO: 4625 - protein, 4 aa, synthetic construct
QGHH

SEQ ID NO: 4626 - protein, 4 aa, synthetic construct
QSKV

SEQ ID NO: 4627 - protein, 4 aa, synthetic construct
QLPS

SEQ ID NO: 4628 - protein, 4 aa, synthetic construct
IGKQ

SEQ ID NO: 4629 - protein, 4 aa, synthetic construct
QAIH

SEQ ID NO: 4630 - protein, 4 aa, synthetic construct
QHGL

SEQ ID NO: 4631 - protein, 4 aa, synthetic construct
QFMC

SEQ ID NO: 4632 - protein, 4 aa, synthetic construct
QNQM

SEQ ID NO: 4633 - protein, 4 aa, synthetic construct
QHLQ

SEQ ID NO: 4634 - protein, 4 aa, synthetic construct
QPAR

SEQ ID NO: 4635 - protein, 4 aa, synthetic construct
QSLQ

SEQ ID NO: 4636 - protein, 4 aa, synthetic construct
QSQL

SEQ ID NO: 4637 - protein, 4 aa, synthetic construct
HSQQ

SEQ ID NO: 4638 - protein, 4 aa, synthetic construct
QMPS

SEQ ID NO: 4639 - protein, 4 aa, synthetic construct
QGSL

SEQ ID NO: 4640 - protein, 4 aa, synthetic construct
QVPA

SEQ ID NO: 4641 - protein, 4 aa, synthetic construct
HYQQ

SEQ ID NO: 4642 - protein, 4 aa, synthetic construct
QVPS

SEQ ID NO: 4643 - protein, 4 aa, synthetic construct
RGEQ

SEQ ID NO: 4644 - protein, 4 aa, synthetic construct
PGQQ

SEQ ID NO: 4645 - protein, 4 aa, synthetic construct
LEQQ

SEQ ID NO: 4646 - protein, 4 aa, synthetic construct
QNQS

SEQ ID NO: 4647 - protein, 4 aa, synthetic construct
QKVI

SEQ ID NO: 4648 - protein, 4 aa, synthetic construct
QNND

SEQ ID NO: 4649 - protein, 4 aa, synthetic construct
QSVH

SEQ ID NO: 4650 - protein, 4 aa, synthetic construct
QPLG

SEQ ID NO: 4651 - protein, 4 aa, synthetic construct
HNQE

SEQ ID NO: 4652 - protein, 4 aa, synthetic construct
QIQQ

SEQ ID NO: 4653 - protein, 4 aa, synthetic construct
QVRN

SEQ ID NO: 4654 - protein, 4 aa, synthetic construct
PSNQ

SEQ ID NO: 4655 - protein, 4 aa, synthetic construct
QVGH

SEQ ID NO: 4656 - protein, 4 aa, synthetic construct
QRDI

SEQ ID NO: 4657 - protein, 4 aa, synthetic construct
QMPN

SEQ ID NO: 4658 - protein, 4 aa, synthetic construct
RGLQ

SEQ ID NO: 4659 - protein, 4 aa, synthetic construct
PSLQ

SEQ ID NO: 4660 - protein, 4 aa, synthetic construct
QRDQ

SEQ ID NO: 4661 - protein, 4 aa, synthetic construct
QAKG

SEQ ID NO: 4662 - protein, 4 aa, synthetic construct
QSAH

SEQ ID NO: 4663 - protein, 4 aa, synthetic construct
QSTM

SEQ ID NO: 4664 - protein, 4 aa, synthetic construct
QREM

SEQ ID NO: 4665 - protein, 4 aa, synthetic construct
QYRA

SEQ ID NO: 4666 - protein, 4 aa, synthetic construct
QRQQ

SEQ ID NO: 4667 - protein, 4 aa, synthetic construct
QWQQ

SEQ ID NO: 4668 - protein, 4 aa, synthetic construct
QRMN

SEQ ID NO: 4669 - protein, 4 aa, synthetic construct
GDSQ

SEQ ID NO: 4670 - protein, 4 aa, synthetic construct
QKIS

SEQ ID NO: 4671 - protein, 4 aa, synthetic construct
PSMQ

SEQ ID NO: 4672 - protein, 4 aa, synthetic construct
SPRQ

SEQ ID NO: 4673 - protein, 4 aa, synthetic construct
MEQQ

SEQ ID NO: 4674 - protein, 4 aa, synthetic construct
QYQN

SEQ ID NO: 4675 - protein, 4 aa, synthetic construct
QIRQ

SEQ ID NO: 4676 - protein, 4 aa, synthetic construct
QSVQ

SEQ ID NO: 4677 - protein, 4 aa, synthetic construct
RSQQ

SEQ ID NO: 4678 - protein, 4 aa, synthetic construct
QNKL

SEQ ID NO: 4679 - DNA, 22 bp, synthetic construct
  source 1..22: mol_type = other DNA
atacatacttctttacattcca

SEQ ID NO: 4680 - protein, 4 aa, synthetic construct
QIQH

SEQ ID NO: 4681 - protein, 4 aa, synthetic construct
PRQQ

SEQ ID NO: 4682 - protein, 4 aa, synthetic construct
HTQQ

SEQ ID NO: 4683 - protein, 4 aa, synthetic construct
QRQH

SEQ ID NO: 4684 - protein, 4 aa, synthetic construct
RNQE

SEQ ID NO: 4685 - protein, 4 aa, synthetic construct
QSKQ

SEQ ID NO: 4686 - protein, 4 aa, synthetic construct
QNQP

SEQ ID NO: 4687 - protein, 4 aa, synthetic construct
QSPQ

SEQ ID NO: 4688 - protein, 4 aa, synthetic construct
QTRQ

SEQ ID NO: 4689 - protein, 4 aa, synthetic construct
QNLH

SEQ ID NO: 4690 - protein, 4 aa, synthetic construct
QNQE

SEQ ID NO: 4691 - protein, 4 aa, synthetic construct
LNQP

SEQ ID NO: 4692 - protein, 4 aa, synthetic construct
QNQD

SEQ ID NO: 4693 - protein, 4 aa, synthetic construct
QNLL

SEQ ID NO: 4694 - protein, 4 aa, synthetic construct
QLVI

SEQ ID NO: 4695 - protein, 4 aa, synthetic construct
RTQE

SEQ ID NO: 4696 - protein, 4 aa, synthetic construct
QTHQ

SEQ ID NO: 4697 - protein, 4 aa, synthetic construct
QDQH

SEQ ID NO: 4698 - protein, 4 aa, synthetic construct
QSQH

SEQ ID NO: 4699 - protein, 4 aa, synthetic construct
VRQQ

SEQ ID NO: 4700 - protein, 4 aa, synthetic construct
AWQQ

SEQ ID NO: 4701 - protein, 4 aa, synthetic construct
QSVP

SEQ ID NO: 4702 - protein, 4 aa, synthetic construct
QNIQ

SEQ ID NO: 4703 - protein, 4 aa, synthetic construct
LDQQ

SEQ ID NO: 4704 - protein, 4 aa, synthetic construct
PDQQ

SEQ ID NO: 4705 - protein, 4 aa, synthetic construct
ESQQ

SEQ ID NO: 4706 - protein, 4 aa, synthetic construct
QRQL

SEQ ID NO: 4707 - protein, 4 aa, synthetic construct
QIIV

SEQ ID NO: 4708 - protein, 4 aa, synthetic construct
QKQS

SEQ ID NO: 4709 - protein, 4 aa, synthetic construct
QSHQ

SEQ ID NO: 4710 - protein, 4 aa, synthetic construct
QFVV

SEQ ID NO: 4711 - protein, 4 aa, synthetic construct
QSQP

SEQ ID NO: 4712 - protein, 4 aa, synthetic construct
QNEQ

SEQ ID NO: 4713 - protein, 4 aa, synthetic construct
INQQ

SEQ ID NO: 4714 - protein, 4 aa, synthetic construct
RNRQ

SEQ ID NO: 4715 - protein, 4 aa, synthetic construct
RDQK

SEQ ID NO: 4716 - protein, 4 aa, synthetic construct
QWKR

SEQ ID NO: 4717 - protein, 4 aa, synthetic construct
ENRQ

SEQ ID NO: 4718 - protein, 4 aa, synthetic construct
QTQP

SEQ ID NO: 4719 - protein, 4 aa, synthetic construct
QKQL

SEQ ID NO: 4720 - protein, 4 aa, synthetic construct
RNQL

SEQ ID NO: 4721 - protein, 4 aa, synthetic construct
ISIQ

SEQ ID NO: 4722 - protein, 4 aa, synthetic construct
QTVC

SEQ ID NO: 4723 - protein, 4 aa, synthetic construct
QQIM

SEQ ID NO: 4724 - protein, 4 aa, synthetic construct
LNHQ

SEQ ID NO: 4725 - protein, 4 aa, synthetic construct
QNQA

SEQ ID NO: 4726 - protein, 4 aa, synthetic construct
QMIH

SEQ ID NO: 4727 - protein, 4 aa, synthetic construct
RNHQ

SEQ ID NO: 4728 - protein, 4 aa, synthetic construct
QKMN

SEQ ID NO: 4729 - protein, 9 aa, synthetic construct
  VARIANT 1: note = Any amino acid
  VARIANT 7: note = Any amino acid
  VARIANT 9: note = Any amino acid
XSGSPHXKX

SEQ ID NO: 4730 - protein, 5 aa, synthetic construct
QNQQT

SEQ ID NO: 4731 - protein, 5 aa, synthetic construct
QNRHT

SEQ ID NO: 4732 - protein, 5 aa, synthetic construct
RDQQT

SEQ ID NO: 4733 - protein, 5 aa, synthetic construct
PNLQT

SEQ ID NO: 4734 - protein, 5 aa, synthetic construct
HVRQT

SEQ ID NO: 4735 - protein, 5 aa, synthetic construct
PNQHT

SEQ ID NO: 4736 - protein, 5 aa, synthetic construct
QSQQT

SEQ ID NO: 4737 - protein, 5 aa, synthetic construct
QNQQI

SEQ ID NO: 4738 - protein, 5 aa, synthetic construct
QPAKT

SEQ ID NO: 4739 - protein, 5 aa, synthetic construct
QTQQN

SEQ ID NO: 4740 - protein, 5 aa, synthetic construct
QNLAT

SEQ ID NO: 4741 - protein, 5 aa, synthetic construct
QNQLT

SEQ ID NO: 4742 - protein, 5 aa, synthetic construct
QGQQT

SEQ ID NO: 4743 - protein, 5 aa, synthetic construct
LNRQS

SEQ ID NO: 4744 - protein, 5 aa, synthetic construct
HNQQT

SEQ ID NO: 4745 - protein, 5 aa, synthetic construct
QNPPT

SEQ ID NO: 4746 - protein, 5 aa, synthetic construct
QNLQT

SEQ ID NO: 4747 - protein, 5 aa, synthetic construct
QYQQT

SEQ ID NO: 4748 - protein, 5 aa, synthetic construct
QDQET

SEQ ID NO: 4749 - protein, 5 aa, synthetic construct
QNHQT

SEQ ID NO: 4750 - protein, 5 aa, synthetic construct
QDQQT

SEQ ID NO: 4751 - protein, 5 aa, synthetic construct
HWQQT

SEQ ID NO: 4752 - protein, 5 aa, synthetic construct
PNQQT

SEQ ID NO: 4753 - protein, 5 aa, synthetic construct
QNQLI

SEQ ID NO: 4754 - protein, 5 aa, synthetic construct
PEQQT

SEQ ID NO: 4755 - protein, 5 aa, synthetic construct
QRTMT

SEQ ID NO: 4756 - protein, 5 aa, synthetic construct
QNQQH

SEQ ID NO: 4757 - protein, 5 aa, synthetic construct
LHQHT

SEQ ID NO: 4758 - protein, 5 aa, synthetic construct
QHRIT

SEQ ID NO: 4759 - protein, 5 aa, synthetic construct
QYIHT

SEQ ID NO: 4760 - protein, 5 aa, synthetic construct
QKFET

SEQ ID NO: 4761 - protein, 5 aa, synthetic construct
QFPST

SEQ ID NO: 4762 - protein, 5 aa, synthetic construct
HNQQR

SEQ ID NO: 4763 - protein, 5 aa, synthetic construct
QAIKT

SEQ ID NO: 4764 - protein, 5 aa, synthetic construct
QNRQT

SEQ ID NO: 4765 - protein, 5 aa, synthetic construct
QYQHT

SEQ ID NO: 4766 - protein, 5 aa, synthetic construct
QNPQS

SEQ ID NO: 4767 - protein, 5 aa, synthetic construct
QHQLT

SEQ ID NO: 4768 - protein, 5 aa, synthetic construct
QSPPT

SEQ ID NO: 4769 - protein, 5 aa, synthetic construct
QAKLT

SEQ ID NO: 4770 - protein, 5 aa, synthetic construct
KSQQT

SEQ ID NO: 4771 - protein, 5 aa, synthetic construct
QDRPT

SEQ ID NO: 4772 - protein, 5 aa, synthetic construct
QSQQL

SEQ ID NO: 4773 - protein, 5 aa, synthetic construct
QAFHT

SEQ ID NO: 4774 - protein, 5 aa, synthetic construct
QKQQD

SEQ ID NO: 4775 - protein, 5 aa, synthetic construct
QNAQT

SEQ ID NO: 4776 - protein, 5 aa, synthetic construct
HNQLT

SEQ ID NO: 4777 - protein, 5 aa, synthetic construct
QNQQY

SEQ ID NO: 4778 - protein, 5 aa, synthetic construct
QKLNT

SEQ ID NO: 4779 - protein, 5 aa, synthetic construct
QNVQT

SEQ ID NO: 4780 - protein, 5 aa, synthetic construct
QAQQT

SEQ ID NO: 4781 - protein, 5 aa, synthetic construct
QNLQA

SEQ ID NO: 4782 - protein, 5 aa, synthetic construct
QTPPT

SEQ ID NO: 4783 - protein, 5 aa, synthetic construct
QYQHA

SEQ ID NO: 4784 - protein, 5 aa, synthetic construct
QGQQA

SEQ ID NO: 4785 - protein, 5 aa, synthetic construct
QPPAT

SEQ ID NO: 4786 - protein, 5 aa, synthetic construct
QERPT

SEQ ID NO: 4787 - protein, 5 aa, synthetic construct
QDLQT

SEQ ID NO: 4788 - protein, 5 aa, synthetic construct
QAMHT

SEQ ID NO: 4789 - protein, 5 aa, synthetic construct
LNQQT

SEQ ID NO: 4790 - protein, 5 aa, synthetic construct
QHPST

SEQ ID NO: 4791 - protein, 5 aa, synthetic construct
PGLQT

SEQ ID NO: 4792 - protein, 5 aa, synthetic construct
QGIRT

SEQ ID NO: 4793 - protein, 5 aa, synthetic construct
QAPAT

SEQ ID NO: 4794 - protein, 5 aa, synthetic construct
QSQQI

SEQ ID NO: 4795 - protein, 5 aa, synthetic construct
QIPPT

SEQ ID NO: 4796 - protein, 5 aa, synthetic construct
QTQLT

SEQ ID NO: 4797 - protein, 5 aa, synthetic construct
QAPST

SEQ ID NO: 4798 - protein, 5 aa, synthetic construct
QNTYA

SEQ ID NO: 4799 - protein, 5 aa, synthetic construct
QNQHI

SEQ ID NO: 4800 - protein, 5 aa, synthetic construct
QNHLT

SEQ ID NO: 4801 - protein, 5 aa, synthetic construct
QIGMT

SEQ ID NO: 4802 - protein, 5 aa, synthetic construct
LNKQT

SEQ ID NO: 4803 - protein, 5 aa, synthetic construct
QLQQT

SEQ ID NO: 4804 - protein, 5 aa, synthetic construct
QRMST

SEQ ID NO: 4805 - protein, 5 aa, synthetic construct
QGILT

SEQ ID NO: 4806 - protein, 5 aa, synthetic construct
QDRQT

SEQ ID NO: 4807 - protein, 5 aa, synthetic construct
RDWQT

SEQ ID NO: 4808 - protein, 5 aa, synthetic construct
QNTHD

SEQ ID NO: 4809 - protein, 5 aa, synthetic construct
PNLQI

SEQ ID NO: 4810 - protein, 5 aa, synthetic construct
QERST

SEQ ID NO: 4811 - protein, 5 aa, synthetic construct
QNYQT

SEQ ID NO: 4812 - protein, 5 aa, synthetic construct
QRTCT

SEQ ID NO: 4813 - protein, 5 aa, synthetic construct
QIGHT

SEQ ID NO: 4814 - protein, 5 aa, synthetic construct
QGAIT

SEQ ID NO: 4815 - protein, 5 aa, synthetic construct
QVPPT

SEQ ID NO: 4816 - protein, 5 aa, synthetic construct
QVQQI

SEQ ID NO: 4817 - protein, 5 aa, synthetic construct
LMRQT

SEQ ID NO: 4818 - protein, 5 aa, synthetic construct
QYSVT

SEQ ID NO: 4819 - protein, 5 aa, synthetic construct
QAITT

SEQ ID NO: 4820 - protein, 5 aa, synthetic construct
QKTLT

SEQ ID NO: 4821 - protein, 5 aa, synthetic construct
QNQWT

SEQ ID NO: 4822 - protein, 5 aa, synthetic construct
QLHHT

SEQ ID NO: 4823 - protein, 5 aa, synthetic construct
QNIII

SEQ ID NO: 4824 - protein, 5 aa, synthetic construct
QGHHT

SEQ ID NO: 4825 - protein, 5 aa, synthetic construct
QSKVT

SEQ ID NO: 4826 - protein, 5 aa, synthetic construct
QLPST

SEQ ID NO: 4827 - protein, 5 aa, synthetic construct
IGKQT

SEQ ID NO: 4828 - protein, 5 aa, synthetic construct
QAIHT

SEQ ID NO: 4829 - protein, 5 aa, synthetic construct
QHGLT

SEQ ID NO: 4830 - protein, 5 aa, synthetic construct
QFMCT

SEQ ID NO: 4831 - protein, 5 aa, synthetic construct
QHLQT

SEQ ID NO: 4832 - protein, 5 aa, synthetic construct
QNHQN

SEQ ID NO: 4833 - protein, 5 aa, synthetic construct
QPART

SEQ ID NO: 4834 - protein, 5 aa, synthetic construct
QSLQT

SEQ ID NO: 4835 - protein, 5 aa, synthetic construct
QSQLT

SEQ ID NO: 4836 - protein, 5 aa, synthetic construct
QDRQS

SEQ ID NO: 4837 - protein, 5 aa, synthetic construct
QMPST

SEQ ID NO: 4838 - protein, 5 aa, synthetic construct
QGSLT

SEQ ID NO: 4839 - protein, 5 aa, synthetic construct
QVPAT

SEQ ID NO: 4840 - protein, 5 aa, synthetic construct
QDKQT

SEQ ID NO: 4841 - protein, 5 aa, synthetic construct
HYQQT

SEQ ID NO: 4842 - protein, 5 aa, synthetic construct
QVPST

SEQ ID NO: 4843 - protein, 5 aa, synthetic construct
RGEQT

SEQ ID NO: 4844 - protein, 5 aa, synthetic construct
PGQQT

SEQ ID NO: 4845 - protein, 5 aa, synthetic construct
QSLQI

SEQ ID NO: 4846 - protein, 5 aa, synthetic construct
LEQQT

SEQ ID NO: 4847 - protein, 5 aa, synthetic construct
QNQST

SEQ ID NO: 4848 - protein, 5 aa, synthetic construct
QKVIT

SEQ ID NO: 4849 - protein, 5 aa, synthetic construct
QNNDQ

SEQ ID NO: 4850 - protein, 5 aa, synthetic construct
QSVHT

SEQ ID NO: 4851 - protein, 5 aa, synthetic construct
QPLGT

SEQ ID NO: 4852 - protein, 5 aa, synthetic construct
HNQET

SEQ ID NO: 4853 - protein, 5 aa, synthetic construct
QNLQI

SEQ ID NO: 4854 - protein, 5 aa, synthetic construct
QIQQT

SEQ ID NO: 4855 - protein, 5 aa, synthetic construct
QVRNT

SEQ ID NO: 4856 - protein, 5 aa, synthetic construct
PSNQT

SEQ ID NO: 4857 - protein, 5 aa, synthetic construct
QVGHT

SEQ ID NO: 4858 - protein, 5 aa, synthetic construct
QRDIT

SEQ ID NO: 4859 - protein, 5 aa, synthetic construct
QMPNT

SEQ ID NO: 4860 - protein, 5 aa, synthetic construct
RGLQT

SEQ ID NO: 4861 - protein, 5 aa, synthetic construct
QKQQT

SEQ ID NO: 4862 - protein, 5 aa, synthetic construct
PSLQT

SEQ ID NO: 4863 - protein, 5 aa, synthetic construct
QRDQT

SEQ ID NO: 4864 - protein, 5 aa, synthetic construct
QAKGT

SEQ ID NO: 4865 - protein, 5 aa, synthetic construct
QSAHT

SEQ ID NO: 4866 - protein, 5 aa, synthetic construct
QSTMT

SEQ ID NO: 4867 - protein, 5 aa, synthetic construct
QREMT

SEQ ID NO: 4868 - protein, 5 aa, synthetic construct
QYRAT

SEQ ID NO: 4869 - protein, 5 aa, synthetic construct
QWQQT

SEQ ID NO: 4870 - protein, 5 aa, synthetic construct
QRMNT

SEQ ID NO: 4871 - protein, 5 aa, synthetic construct
GDSQT

SEQ ID NO: 4872 - protein, 5 aa, synthetic construct
QKIST

SEQ ID NO: 4873 - protein, 5 aa, synthetic construct
PSMQT

SEQ ID NO: 4874 - protein, 5 aa, synthetic construct
SPRQT

SEQ ID NO: 4875 - protein, 5 aa, synthetic construct
MEQQT

SEQ ID NO: 4876 - protein, 5 aa, synthetic construct
QYQNT

SEQ ID NO: 4877 - protein, 5 aa, synthetic construct
QHQQT

SEQ ID NO: 4878 - protein, 5 aa, synthetic construct
INQQT

SEQ ID NO: 4879 - protein, 5 aa, synthetic construct
PNQQH

SEQ ID NO: 4880 - protein, 5 aa, synthetic construct
ENRQT

SEQ ID NO: 4881 - protein, 5 aa, synthetic construct
QTQQA

SEQ ID NO: 4882 - protein, 5 aa, synthetic construct
QNQAT

SEQ ID NO: 4883 - protein, 4 aa, synthetic construct
KTII

SEQ ID NO: 4884 - protein, 4 aa, synthetic construct
KTFP

SEQ ID NO: 4885 - protein, 4 aa, synthetic construct
KTEK

SEQ ID NO: 4886 - protein, 4 aa, synthetic construct
KTVN

SEQ ID NO: 4887 - protein, 4 aa, synthetic construct
KTFN

SEQ ID NO: 4888 - protein, 4 aa, synthetic construct
KTIN

SEQ ID NO: 4889 - protein, 4 aa, synthetic construct
TTIN

SEQ ID NO: 4890 - protein, 4 aa, synthetic construct
KSIN

SEQ ID NO: 4891 - protein, 4 aa, synthetic construct
KTER

SEQ ID NO: 4892 - protein, 4 aa, synthetic construct
KELH

SEQ ID NO: 4893 - protein, 4 aa, synthetic construct
KAIN

SEQ ID NO: 4894 - protein, 4 aa, synthetic construct
KTDN

SEQ ID NO: 4895 - protein, 4 aa, synthetic construct
KTFH

SEQ ID NO: 4896 - protein, 4 aa, synthetic construct
KTSN

SEQ ID NO: 4897 - protein, 4 aa, synthetic construct
ETIN

SEQ ID NO: 4898 - protein, 4 aa, synthetic construct
NTIN

SEQ ID NO: 4899 - protein, 4 aa, synthetic construct
KTEN

SEQ ID NO: 4900 - protein, 4 aa, synthetic construct
KTSS

SEQ ID NO: 4901 - protein, 4 aa, synthetic construct
KTCN

SEQ ID NO: 4902 - protein, 4 aa, synthetic construct
KTEH

SEQ ID NO: 4903 - protein, 4 aa, synthetic construct
KAEM

SEQ ID NO: 4904 - protein, 4 aa, synthetic construct
KATN

SEQ ID NO: 4905 - protein, 4 aa, synthetic construct
KAIK

SEQ ID NO: 4906 - protein, 4 aa, synthetic construct
KTDK

SEQ ID NO: 4907 - protein, 4 aa, synthetic construct
KTFK

SEQ ID NO: 4908 - protein, 4 aa, synthetic construct
KSDQ

SEQ ID NO: 4909 - protein, 4 aa, synthetic construct
KTEI

SEQ ID NO: 4910 - protein, 4 aa, synthetic construct
KTID

SEQ ID NO: 4911 - protein, 4 aa, synthetic construct
KNTN

SEQ ID NO: 4912 - protein, 4 aa, synthetic construct
KTET

SEQ ID NO: 4913 - protein, 4 aa, synthetic construct
KTEL

SEQ ID NO: 4914 - protein, 4 aa, synthetic construct
KNIN

SEQ ID NO: 4915 - protein, 4 aa, synthetic construct
KTEA

SEQ ID NO: 4916 - protein, 4 aa, synthetic construct
KTAN

SEQ ID NO: 4917 - protein, 4 aa, synthetic construct
NTIY

SEQ ID NO: 4918 - protein, 4 aa, synthetic construct
KTFS

SEQ ID NO: 4919 - protein, 4 aa, synthetic construct
KTES

SEQ ID NO: 4920 - protein, 4 aa, synthetic construct
KTTN

SEQ ID NO: 4921 - protein, 4 aa, synthetic construct
KTED

SEQ ID NO: 4922 - protein, 4 aa, synthetic construct
KTNN

SEQ ID NO: 4923 - protein, 4 aa, synthetic construct
KEVH

SEQ ID NO: 4924 - protein, 4 aa, synthetic construct
KTIS

SEQ ID NO: 4925 - protein, 4 aa, synthetic construct
KTVR

SEQ ID NO: 4926 - protein, 4 aa, synthetic construct
KTDR

SEQ ID NO: 4927 - protein, 4 aa, synthetic construct
ETIK

SEQ ID NO: 4928 - protein, 4 aa, synthetic construct
KNHI

SEQ ID NO: 4929 - protein, 4 aa, synthetic construct
KESD

SEQ ID NO: 4930 - protein, 4 aa, synthetic construct
KTIK

SEQ ID NO: 4931 - protein, 4 aa, synthetic construct
KTDL

SEQ ID NO: 4932 - protein, 4 aa, synthetic construct
KTVP

SEQ ID NO: 4933 - protein, 4 aa, synthetic construct
KTVI

SEQ ID NO: 4934 - protein, 4 aa, synthetic construct
KAEH

SEQ ID NO: 4935 - protein, 4 aa, synthetic construct
KNCL

SEQ ID NO: 4936 - protein, 4 aa, synthetic construct
KTVK

SEQ ID NO: 4937 - protein, 4 aa, synthetic construct
KNAD

SEQ ID NO: 4938 - protein, 4 aa, synthetic construct
KTIT

SEQ ID NO: 4939 - protein, 4 aa, synthetic construct
KNCV

SEQ ID NO: 4940 - protein, 4 aa, synthetic construct
KNAL

SEQ ID NO: 4941 - protein, 4 aa, synthetic construct
KVIN

SEQ ID NO: 4942 - protein, 4 aa, synthetic construct
KTEF

SEQ ID NO: 4943 - protein, 4 aa, synthetic construct
KTRE

SEQ ID NO: 4944 - protein, 4 aa, synthetic construct
KQGE

SEQ ID NO: 4945 - protein, 4 aa, synthetic construct
KSEK

SEQ ID NO: 4946 - protein, 4 aa, synthetic construct
KNVN

SEQ ID NO: 4947 - protein, 4 aa, synthetic construct
KGGE

SEQ ID NO: 4948 - protein, 4 aa, synthetic construct
KEFV

SEQ ID NO: 4949 - protein, 4 aa, synthetic construct
KSDK

SEQ ID NO: 4950 - protein, 4 aa, synthetic construct
KTEQ

SEQ ID NO: 4951 - protein, 4 aa, synthetic construct
KEVQ

SEQ ID NO: 4952 - protein, 4 aa, synthetic construct
KTEY

SEQ ID NO: 4953 - protein, 4 aa, synthetic construct
KNCW

SEQ ID NO: 4954 - protein, 4 aa, synthetic construct
KTDV

SEQ ID NO: 4955 - protein, 4 aa, synthetic construct
KSDI

SEQ ID NO: 4956 - protein, 4 aa, synthetic construct
KNSI

SEQ ID NO: 4957 - protein, 4 aa, synthetic construct
KNSL

SEQ ID NO: 4958 - protein, 4 aa, synthetic construct
KEVV

SEQ ID NO: 4959 - protein, 4 aa, synthetic construct
KTEP

SEQ ID NO: 4960 - protein, 4 aa, synthetic construct
KSEL

SEQ ID NO: 4961 - protein, 4 aa, synthetic construct
KTWQ

SEQ ID NO: 4962 - protein, 4 aa, synthetic construct
KTEV

SEQ ID NO: 4963 - protein, 4 aa, synthetic construct
KAVN

SEQ ID NO: 4964 - protein, 4 aa, synthetic construct
KGVL

SEQ ID NO: 4965 - protein, 4 aa, synthetic construct
KTEG

SEQ ID NO: 4966 - protein, 4 aa, synthetic construct
KTRD

SEQ ID NO: 4967 - protein, 4 aa, synthetic construct
KTGN

SEQ ID NO: 4968 - protein, 4 aa, synthetic construct
KNAI

SEQ ID NO: 4969 - protein, 4 aa, synthetic construct
KAEN

SEQ ID NO: 4970 - protein, 4 aa, synthetic construct
KAET

SEQ ID NO: 4971 - protein, 4 aa, synthetic construct
KTVH

SEQ ID NO: 4972 - protein, 4 aa, synthetic construct
KETA

SEQ ID NO: 4973 - protein, 4 aa, synthetic construct
KNNL

SEQ ID NO: 4974 - protein, 4 aa, synthetic construct
EAIN

SEQ ID NO: 4975 - protein, 4 aa, synthetic construct
KSLN

SEQ ID NO: 4976 - protein, 4 aa, synthetic construct
KTIP

SEQ ID NO: 4977 - protein, 4 aa, synthetic construct
KTIH

SEQ ID NO: 4978 - protein, 9 aa, synthetic construct
  VARIANT 1: note = Any amino acid
  VARIANT 2: note = Any amino acid other than S
  VARIANT 3: note = Any amino acid other than G
  VARIANT 8: note = Any amino acid
  VARIANT 9: note = Any amino acid
XXXSPHKXX

SEQ ID NO: 4979 - protein, 5 aa, synthetic construct
NPHKS

SEQ ID NO: 4980 - protein, 6 aa, synthetic construct
NPHKSG

SEQ ID NO: 4981 - protein, 6 aa, synthetic construct
SPHKIV

SEQ ID NO: 4982 - protein, 6 aa, synthetic construct
GHDNPH

SEQ ID NO: 4983 - protein, 6 aa, synthetic construct
AHDSPH

SEQ ID NO: 4984 - protein, 6 aa, synthetic construct
KHDSPH

SEQ ID NO: 4985 - protein, 6 aa, synthetic construct
WHDSPH

SEQ ID NO: 4986 - protein, 6 aa, synthetic construct
RHDSPH

SEQ ID NO: 4987 - protein, 6 aa, synthetic construct
LHDSPH

SEQ ID NO: 4988 - protein, 6 aa, synthetic construct
IHDSPH

SEQ ID NO: 4989 - protein, 6 aa, synthetic construct
MHDSPH

SEQ ID NO: 4990 - protein, 6 aa, synthetic construct
NHDSPH

SEQ ID NO: 4991 - protein, 6 aa, synthetic construct
THDSPH

SEQ ID NO: 4992 - protein, 6 aa, synthetic construct
EHDSPH

SEQ ID NO: 4993 - protein, 6 aa, synthetic construct
QHDSPH

SEQ ID NO: 4994 - protein, 6 aa, synthetic construct
YHDSPH

SEQ ID NO: 4995 - protein, 6 aa, synthetic construct
HHDSPH

SEQ ID NO: 4996 - protein, 6 aa, synthetic construct
FHDSPH

SEQ ID NO: 4997 - protein, 6 aa, synthetic construct
VHDSPH

SEQ ID NO: 4998 - protein, 9 aa, synthetic construct
GHDNPHKSG

SEQ ID NO: 4999 - protein, 9 aa, synthetic construct
AHDSPHKSG

SEQ ID NO: 5000 - protein, 9 aa, synthetic construct
AHDSPHKIG

SEQ ID NO: 5001 - protein, 9 aa, synthetic construct
KHDSPHKSG

SEQ ID NO: 5002 - protein, 9 aa, synthetic construct
WHDSPHKSG

SEQ ID NO: 5003 - protein, 9 aa, synthetic construct
RHDSPHKSG

SEQ ID NO: 5004 - protein, 9 aa, synthetic construct
LHDSPHKSG

SEQ ID NO: 5005 - protein, 9 aa, synthetic construct
IHDSPHKSG

SEQ ID NO: 5006 - protein, 9 aa, synthetic construct
MHDSPHKSG

SEQ ID NO: 5007 - protein, 9 aa, synthetic construct
NHDSPHKSG

SEQ ID NO: 5008 - protein, 9 aa, synthetic construct
THDSPHKSG

SEQ ID NO: 5009 - protein, 9 aa, synthetic construct
EHDSPHKSG

SEQ ID NO: 5010 - protein, 9 aa, synthetic construct
QHDSPHKSG

SEQ ID NO: 5011 - protein, 9 aa, synthetic construct
RHDSPHKIV

SEQ ID NO: 5012 - protein, 9 aa, synthetic construct
YHDSPHKSG

SEQ ID NO: 5013 - protein, 9 aa, synthetic construct
HHDSPHKSG

SEQ ID NO: 5014 - protein, 9 aa, synthetic construct
FHDSPHKSG

SEQ ID NO: 5015 - protein, 9 aa, synthetic construct
VHDSPHKSG

SEQ ID NO: 5016 - protein, 5 aa, synthetic construct
QIRQT

SEQ ID NO: 5017 - protein, 5 aa, synthetic construct
QNQHA

SEQ ID NO: 5018 - protein, 5 aa, synthetic construct
QSVQT

SEQ ID NO: 5019 - protein, 5 aa, synthetic construct
RSQQT

SEQ ID NO: 5020 - protein, 5 aa, synthetic construct
QNKLE

SEQ ID NO: 5021 - protein, 5 aa, synthetic construct
QNQQK

SEQ ID NO: 5022 - protein, 5 aa, synthetic construct
QHQQA

SEQ ID NO: 5023 - protein, 5 aa, synthetic construct
QIQHT

SEQ ID NO: 5024 - protein, 5 aa, synthetic construct
PRQQT

SEQ ID NO: 5025 - protein, 5 aa, synthetic construct
HTQQT

SEQ ID NO: 5026 - protein, 5 aa, synthetic construct
QRQHT

SEQ ID NO: 5027 - protein, 5 aa, synthetic construct
QNQQS

SEQ ID NO: 5028 - protein, 5 aa, synthetic construct
RNQET

SEQ ID NO: 5029 - protein, 5 aa, synthetic construct
KNQQT

SEQ ID NO: 5030 - protein, 5 aa, synthetic construct
QTQQT

SEQ ID NO: 5031 - protein, 5 aa, synthetic construct
QTQQI

SEQ ID NO: 5032 - protein, 5 aa, synthetic construct
QSKQA

SEQ ID NO: 5033 - protein, 5 aa, synthetic construct
QNQPP

SEQ ID NO: 5034 - protein, 5 aa, synthetic construct
QSPQT

SEQ ID NO: 5035 - protein, 5 aa, synthetic construct
QNQQG

SEQ ID NO: 5036 - protein, 5 aa, synthetic construct
QNQHT

SEQ ID NO: 5037 - protein, 5 aa, synthetic construct
QTRQT

SEQ ID NO: 5038 - protein, 5 aa, synthetic construct
QNLHT

SEQ ID NO: 5039 - protein, 5 aa, synthetic construct
QNQET

SEQ ID NO: 5040 - protein, 5 aa, synthetic construct
LNQPT

SEQ ID NO: 5041 - protein, 5 aa, synthetic construct
QNQDT

SEQ ID NO: 5042 - protein, 5 aa, synthetic construct
RNQQT

SEQ ID NO: 5043 - protein, 5 aa, synthetic construct
QNLLT

SEQ ID NO: 5044 - protein, 5 aa, synthetic construct
QLVIT

SEQ ID NO: 5045 - protein, 5 aa, synthetic construct
RTQET

SEQ ID NO: 5046 - protein, 5 aa, synthetic construct
QTHQT

SEQ ID NO: 5047 - protein, 5 aa, synthetic construct
QNQPA

SEQ ID NO: 5048 - protein, 5 aa, synthetic construct
QDQHT

SEQ ID NO: 5049 - protein, 5 aa, synthetic construct
QSQHT

SEQ ID NO: 5050 - protein, 5 aa, synthetic construct
RNQQI

SEQ ID NO: 5051 - protein, 5 aa, synthetic construct
VRQQT

SEQ ID NO: 5052 - protein, 5 aa, synthetic construct
QNQHS

SEQ ID NO: 5053 - protein, 5 aa, synthetic construct
AWQQT

SEQ ID NO: 5054 - protein, 5 aa, synthetic construct
QSVPT

SEQ ID NO: 5055 - protein, 5 aa, synthetic construct
QNIQP

SEQ ID NO: 5056 - protein, 5 aa, synthetic construct
QNHLN

SEQ ID NO: 5057 - protein, 5 aa, synthetic construct
LDQQT

SEQ ID NO: 5058 - protein, 5 aa, synthetic construct
PDQQS

SEQ ID NO: 5059 - protein, 5 aa, synthetic construct
ESQQT

SEQ ID NO: 5060 - protein, 5 aa, synthetic construct
QNKQT

SEQ ID NO: 5061 - protein, 5 aa, synthetic construct
QRQLT

SEQ ID NO: 5062 - protein, 5 aa, synthetic construct
QIIVT

SEQ ID NO: 5063 - protein, 5 aa, synthetic construct
QKQST

SEQ ID NO: 5064 - protein, 5 aa, synthetic construct
QSHQT

SEQ ID NO: 5065 - protein, 5 aa, synthetic construct
QFVVT

SEQ ID NO: 5066 - protein, 5 aa, synthetic construct
QSQPT

SEQ ID NO: 5067 - protein, 5 aa, synthetic construct
QNEQT

SEQ ID NO: 5068 - protein, 5 aa, synthetic construct
RNRQT

SEQ ID NO: 5069 - protein, 5 aa, synthetic construct
QSKQT

SEQ ID NO: 5070 - protein, 5 aa, synthetic construct
QNPLT

SEQ ID NO: 5071 - protein, 5 aa, synthetic construct
RDQKT

SEQ ID NO: 5072 - protein, 5 aa, synthetic construct
HNQQN

SEQ ID NO: 5073 - protein, 5 aa, synthetic construct
QWKRT

SEQ ID NO: 5074 - protein, 5 aa, synthetic construct
QNHQI

SEQ ID NO: 5075 - protein, 5 aa, synthetic construct
QNQQA

SEQ ID NO: 5076 - protein, 5 aa, synthetic construct
QNQLN

SEQ ID NO: 5077 - protein, 5 aa, synthetic construct
QTQPT

SEQ ID NO: 5078 - protein, 5 aa, synthetic construct
QKQLT

SEQ ID NO: 5079 - protein, 5 aa, synthetic construct
RNQLA

SEQ ID NO: 5080 - protein, 5 aa, synthetic construct
RNQQS

SEQ ID NO: 5081 - protein, 5 aa, synthetic construct
ISIQT

SEQ ID NO: 5082 - protein, 5 aa, synthetic construct
QNQQN

SEQ ID NO: 5083 - protein, 5 aa, synthetic construct
QSQQS

SEQ ID NO: 5084 - protein, 5 aa, synthetic construct
QTVCT

SEQ ID NO: 5085 - protein, 5 aa, synthetic construct
QYQQI

SEQ ID NO: 5086 - protein, 5 aa, synthetic construct
QQIMT

SEQ ID NO: 5087 - protein, 5 aa, synthetic construct
QNEQS

SEQ ID NO: 5088 - protein, 5 aa, synthetic construct
LNHQT

SEQ ID NO: 5089 - protein, 5 aa, synthetic construct
QMIHT

SEQ ID NO: 5090 - protein, 5 aa, synthetic construct
RNHQS

SEQ ID NO: 5091 - protein, 5 aa, synthetic construct
QKMNT

SEQ ID NO: 5092 - protein, 5 aa, synthetic construct
QSQQN

SEQ ID NO: 5093 - protein, 4 aa, synthetic construct
KSIY

SEQ ID NO: 5094 - protein, 4 aa, synthetic construct
KIIN

SEQ ID NO: 5095 - protein, 4 aa, synthetic construct
KAII

SEQ ID NO: 5096 - protein, 4 aa, synthetic construct
KAIS

SEQ ID NO: 5097 - protein, 4 aa, synthetic construct
KTVD

SEQ ID NO: 5098 - protein, 4 aa, synthetic construct
KTIE

SEQ ID NO: 5099 - protein, 4 aa, synthetic construct
KTIY

SEQ ID NO: 5100 - protein, 4 aa, synthetic construct
KNVV

SEQ ID NO: 5101 - protein, 4 aa, synthetic construct
KTDA

SEQ ID NO: 5102 - protein, 4 aa, synthetic construct
KTEM

SEQ ID NO: 5103 - protein, 4 aa, synthetic construct
KIVN

SEQ ID NO: 5104 - protein, 4 aa, synthetic construct
KIGN

SEQ ID NO: 5105 - protein, 4 aa, synthetic construct
KEVM

SEQ ID NO: 5106 - protein, 4 aa, synthetic construct
KYQV

SEQ ID NO: 5107 - protein, 4 aa, synthetic construct
KTVE

SEQ ID NO: 5108 - protein, 4 aa, synthetic construct
KAID

SEQ ID NO: 5109 - protein, 4 aa, synthetic construct
KTIM

SEQ ID NO: 5110 - protein, 4 aa, synthetic construct
KEVG

SEQ ID NO: 5111 - protein, 4 aa, synthetic construct
KSEM

SEQ ID NO: 5112 - protein, 4 aa, synthetic construct
KAQQ

SEQ ID NO: 5113 - protein, 4 aa, synthetic construct
KCGE

SEQ ID NO: 5114 - protein, 4 aa, synthetic construct
KASN

SEQ ID NO: 5115 - protein, 4 aa, synthetic construct
KTIG

SEQ ID NO: 5116 - protein, 4 aa, synthetic construct
KTDP

SEQ ID NO: 5117 - protein, 4 aa, synthetic construct
KELV

SEQ ID NO: 5118 - protein, 4 aa, synthetic construct
KELM

SEQ ID NO: 5119 - protein, 4 aa, synthetic construct
KNEI

SEQ ID NO: 5120 - protein, 4 aa, synthetic construct
KTPN

SEQ ID NO: 5121 - protein, 4 aa, synthetic construct
KITN

SEQ ID NO: 5122 - protein, 4 aa, synthetic construct
KTDI

SEQ ID NO: 5123 - protein, 4 aa, synthetic construct
KTDQ

SEQ ID NO: 5124 - protein, 4 aa, synthetic construct
KGIN

SEQ ID NO: 5125 - protein, 4 aa, synthetic construct
KSEI

SEQ ID NO: 5126 - protein, 4 aa, synthetic construct
KWSA

SEQ ID NO: 5127 - protein, 4 aa, synthetic construct
KELA

SEQ ID NO: 5128 - protein, 4 aa, synthetic construct
KQTQ

SEQ ID NO: 5129 - protein, 4 aa, synthetic construct
KGAD

SEQ ID NO: 5130 - protein, 4 aa, synthetic construct
KVGE

SEQ ID NO: 5131 - protein, 4 aa, synthetic construct
KANE

SEQ ID NO: 5132 - protein, 4 aa, synthetic construct
KTDT

SEQ ID NO: 5133 - protein, 4 aa, synthetic construct
KTCI

SEQ ID NO: 5134 - protein, 4 aa, synthetic construct
KELR

SEQ ID NO: 5135 - protein, 4 aa, synthetic construct
KCQI

SEQ ID NO: 5136 - protein, 4 aa, synthetic construct
KGVM

SEQ ID NO: 5137 - protein, 4 aa, synthetic construct
KACD

SEQ ID NO: 5138 - protein, 4 aa, synthetic construct
KNEL

SEQ ID NO: 5139 - protein, 4 aa, synthetic construct
KAAE

SEQ ID NO: 5140 - protein, 25 aa, synthetic construct
GGGGSGGGGSGGGGSGGGGSGGGGS

SEQ ID NO: 5141 - protein, 4 aa, synthetic construct
KGQN

SEQ ID NO: 5142 - protein, 4 aa, synthetic construct
KNEF

SEQ ID NO: 5143 - protein, 4 aa, synthetic construct
KTSI

SEQ ID NO: 5144 - protein, 4 aa, synthetic construct
KCDQ

SEQ ID NO: 5145 - protein, 4 aa, synthetic construct
KEIL

SEQ ID NO: 5146 - protein, 4 aa, synthetic construct
KTPD

SEQ ID NO: 5147 - protein, 4 aa, synthetic construct
SPHK

SEQ ID NO: 5148 - protein, 11 aa, synthetic construct
ERVSGSPHSKA

SEQ ID NO: 5149 - protein, 12 aa, synthetic construct
AEIGHDSPHKSG

SEQ ID NO: 5150 - protein, 11 aa, synthetic construct
ENVSGSPHSKA

SEQ ID NO: 5151 - protein, 27 aa, synthetic construct
KTINGSGQNQQTLKFSVAGPSNMAVQG

SEQ ID NO: 5152 - protein, 12 aa, synthetic construct
KTINGSGQNQQT

SEQ ID NO: 5153 - protein, 9 aa, synthetic construct
NGSGQNQQT

SEQ ID NO: 5154 - protein, 15 aa, synthetic construct
GGGGSGGGGSGGGGS

SEQ ID NO: 5155 - protein, 25 aa, synthetic construct
GGGGSGGGGSGGGGSGGGGSGGGGS

SEQ ID NO: 5156 - protein, 30 aa, synthetic construct
GGGGSGGGGSGGGGSGGGGSGGGGSGGGGS

SEQ ID NO: 5157 - protein, 40 aa, synthetic construct
GGGGSGGGGSGGGGSGGGGSGGGGSGGGGSGGGGSGGGGS

SEQ ID NO: 5158 - protein, 40 aa, synthetic construct; identical to SEQ ID NO: 5157
  VARIANT 1..40: note = This sequence may encompass 0-8 GGGGS repeating units

SEQ ID NO: 5159-5245 - skipped (87 entries)

SEQ ID NO: 5246 - protein, 17 aa, synthetic construct
TINGSGSPHKYGQNQQT

SEQ ID NO: 5247-5659 - skipped (413 entries)

SEQ ID NO: 5660 - protein, 18 aa, synthetic construct
KTINGSGSPHSKAQNQQT

SEQ ID NO: 5661-5827 - skipped (167 entries)

SEQ ID NO: 5828 - protein, 18 aa, synthetic construct
KTINGHDSPHKSGQNQQT

SEQ ID NO: 5829-6400 - skipped (572 entries)

SEQ ID NO: 6401 - protein, 11 aa, synthetic construct
EKMSGSPHSKA

SEQ ID NO: 6402 - protein, 11 aa, synthetic construct
HDSPHSKAQNL

SEQ ID NO: 6403 - protein, 11 aa, synthetic construct
VNGHDSPHSKA

SEQ ID NO: 6404-6405 - skipped (2 entries)

SEQ ID NO: 6406 - protein, 8 aa, synthetic construct
GSGQNQQT

SEQ ID NO: 6407-8999 - skipped (2593 entries)

SEQ ID NO: 9000 - DNA, 1184 bp, synthetic construct
  source 1..1184: mol_type = other DNA
cgtgaggctccggtgcccgtcagtgggcagagcgcacatcgcccacagtccccgagaagttggggggaggggtcggcaattgaaccggtgcctagagaaggtggcgcggggtaaactgggaaagtgatgtcgtgtactggctccgcctttttcccgagggtgggggagaaccgtatataagtgcagtagtcgccgtgaacgttctttttcgcaacgggtttgccgccagaacacaggtaagtgccgtgtgtggttcccgcgggcctggcctctttacgggttatggcccttgcgtgccttgaattacttccacctggctgcagtacgtgattcttgatcccgagcttcgggttggaagtgggtgggagagttcgaggccttgcgcttaaggagccccttcgcctcgtgcttgagttgaggcctggcctgggcgctggggccgccgcgtgcgaatctggtggcaccttcgcgcctgtctcgctgctttcgataagtctctagccatttaaaatttttgatgacctgctgcgacgctttttttctggcaagatagtcttgtaaatgcgggccaagatctgcacactggtatttcggtttttggggccgcgggcggcgacggggcccgtgcgtcccagcgcacatgttcggcgaggcggggcctgcgagcgcggccaccgagaatcggacgggggtagtctcaagctggccggcctgctctggtgcctggcctcgcgccgccgtgtatcgccccgccctgggcggcaaggctggcccggtcggcaccagttgcgtgagcggaaagatggccgcttcccggccctgctgcagggagctcaaaatggaggacgcggcgctcgggagagcgggcgggtgagtcacccacacaaaggaaaagggcctttccgtcctcagccgtcgcttcatgtgactccacggagtaccgggcgccgtccaggcacctcgattagttctcgagcttttggagtacgtcgtctttaggttggggggaggggttttatgcgatggagtttccccacactgagtgggtggagactgaagttaggccagcttggcacttgatgtaattctccttggaatttgccctttttgagtttggatcttggttcattctcaagcctcagacagtggttcaaagtttttttcttccatttcaggtgtcgtga

SEQ ID NO: 9001 - DNA, 227 bp, synthetic construct
  source 1..227: mol_type = other DNA
gcccgtcagtgggcagagcgcacatcgcccacagtccccgagaagttggggggaggggtcggcaattgaaccggtgcctagagaaggtggcgcggggtaaactgggaaagtgatgtcgtgtactggctccgcctttttcccgagggtgggggagaaccgtatataagtgcagtagtcgccgtgaacgttctttttcgcaacgggtttgccgccagaacacgcgtaag

SEQ ID NO: 9002 - skipped

SEQ ID NO: 9003 - DNA, 16 bp, synthetic construct
  source 1..16: mol_type = other DNA
ggtggagaagagcatg

SEQ ID NO: 9004 - DNA, 27 bp, synthetic construct
  source 1..27: mol_type = other DNA
gtcatcactgaggtggagaagagcatg

SEQ ID NO: 9005-9007 - skipped (3 entries)

SEQ ID NO: 9008 - DNA, 222 bp, synthetic construct
  source 1..222: mol_type = other DNA
gcccgtcagtgggcagagcgcacatcgcccacagtccccgagaagttggggggaggggtcggcaattgaaccggtgcctagagaaggtggcgcggggtaaactgggaaagtgatgtcgtgtactggctccgcctttttcccgagggtgggggagaaccgtatataagtgcagtagtcgccgtgaacgttctttttcgcaacgggtttgccgccagaacacag

SEQ ID NO: 9009 - DNA, 222 bp, synthetic construct
  source 1..222: mol_type = other DNA
gcccgtcagtgggcagagcgcacatcgcccacagtccccgagaagttggggggaggggtcggcaattgaaccggtgcctagagaaggtggcgcggggtaaactgggaaagtgatgtcgtgtactggctccgcctttttcccgagggtgggggagaaccgtatataagtgcagtagtcgccgtgaacgttctttttcgcaacgggtttgccgccagaacacgc

SEQ ID NO: 9010 - skipped

SEQ ID NO: 9011 - DNA, 229 bp, synthetic construct
  source 1..229: mol_type = other DNA
gtgcccgtcagtgggcagagcgcacatcgcccacagtccccgagaagttggggggaggggtcggcaattgaaccggtgcctagagaaggtggcgcggggtaaactgggaaagtgatgtcgtgtactggctccgcctttttcccgagggtgggggagaaccgtatataagtgcagtagtcgccgtgaacgttctttttcgcaacgggtttgccgccagaacacgcgtaag

SEQ ID NO: 9012 - DNA, 235 bp, synthetic construct
  source 1..235: mol_type = other DNA
gctccggtgcccgtcagtgggcagagcgcacatcgcccacagtccccgagaagttggggggaggggtcggcaattgaaccggtgcctagagaaggtggcgcggggtaaactgggaaagtgatgtcgtgtactggctccgcctttttcccgagggtgggggagaaccgtatataagtgcagtagtcgccgtgaacgttctttttcgcaacgggtttgccgccagaacacgcgtaag

SEQ ID NO: 9013 - DNA, 241 bp, synthetic construct
  source 1..241: mol_type = other DNA
cgtgaggctccggtgcccgtcagtgggcagagcgcacatcgcccacagtccccgagaagttggggggaggggtcggcaattgaaccggtgcctagagaaggtggcgcggggtaaactgggaaagtgatgtcgtgtactggctccgcctttttcccgagggtgggggagaaccgtatataagtgcagtagtcgccgtgaacgttctttttcgcaacgggtttgccgccagaacacgcgtaag

SEQ ID NO: 9014 - DNA, 236 bp, synthetic construct
  source 1..236: mol_type = other DNA
cgtgaggctccggtgcccgtcagtgggcagagcgcacatcgcccacagtccccgagaagttggggggaggggtcggcaattgaaccggtgcctagagaaggtggcgcggggtaaactgggaaagtgatgtcgtgtactggctccgcctttttcccgagggtgggggagaaccgtatataagtgcagtagtcgccgtgaacgttctttttcgcaacgggtttgccgccagaacacag

SEQ ID NO: 9015 - DNA, 246 bp, synthetic construct
  source 1..246: mol_type = other DNA
gcatgcgtgaggctccggtgcccgtcagtgggcagagcgcacatcgcccacagtccccgagaagttggggggaggggtcggcaattgaaccggtgcctagagaaggtggcgcggggtaaactgggaaagtgatgtcgtgtactggctccgcctttttcccgagggtgggggagaaccgtatataagtgcagtagtcgccgtgaacgttctttttcgcaacgggtttgccgccagaacacgcgtaag

SEQ ID NO: 9016 - DNA, 241 bp, synthetic construct
  source 1..241: mol_type = other DNA
gcatgcgtgaggctccggtgcccgtcagtgggcagagcgcacatcgcccacagtccccgagaagttggggggaggggtcggcaattgaaccggtgcctagagaaggtggcgcggggtaaactgggaaagtgatgtcgtgtactggctccgcctttttcccgagggtgggggagaaccgtatataagtgcagtagtcgccgtgaacgttctttttcgcaacgggtttgccgccagaacacag

SEQ ID NO: 9017 - DNA, 257 bp, synthetic construct
  source 1..257: mol_type = other DNA
ggtggagaagagcatgcgtgaggctccggtgcccgtcagtgggcagagcgcacatcgcccacagtccccgagaagttggggggaggggtcggcaattgaaccggtgcctagagaaggtggcgcggggtaaactgggaaagtgatgtcgtgtactggctccgcctttttcccgagggtgggggagaaccgtatataagtgcagtagtcgccgtgaacgttctttttcgcaacgggtttgccgccagaacacgcgtaag

SEQ ID NO: 9018 - DNA, 252 bp, synthetic construct
  source 1..252: mol_type = other DNA
ggtggagaagagcatgcgtgaggctccggtgcccgtcagtgggcagagcgcacatcgcccacagtccccgagaagttggggggaggggtcggcaattgaaccggtgcctagagaaggtggcgcggggtaaactgggaaagtgatgtcgtgtactggctccgcctttttcccgagggtgggggagaaccgtatataagtgcagtagtcgccgtgaacgttctttttcgcaacgggtttgccgccagaacacag

SEQ ID NO: 9019 - DNA, 268 bp, synthetic construct
  source 1..268: mol_type = other DNA
gtcatcactgaggtggagaagagcatgcgtgaggctccggtgcccgtcagtgggcagagcgcacatcgcccacagtccccgagaagttggggggaggggtcggcaattgaaccggtgcctagagaaggtggcgcggggtaaactgggaaagtgatgtcgtgtactggctccgcctttttcccgagggtgggggagaaccgtatataagtgcagtagtcgccgtgaacgttctttttcgcaacgggtttgccgccagaacacgcgtaag

SEQ ID NO: 9020 - DNA, 263 bp, synthetic construct
  source 1..263: mol_type = other DNA
gtcatcactgaggtggagaagagcatgcgtgaggctccggtgcccgtcagtgggcagagcgcacatcgcccacagtccccgagaagttggggggaggggtcggcaattgaaccggtgcctagagaaggtggcgcggggtaaactgggaaagtgatgtcgtgtactggctccgcctttttcccgagggtgggggagaaccgtatataagtgcagtagtcgccgtgaacgttctttttcgcaacgggtttgccgccagaacacag

SEQ ID NO: 9021 - DNA, 12 bp, synthetic construct
  source 1..12: mol_type = other DNA
gccgccaccatg

SEQ ID NO: 9022 - DNA, 11 bp, synthetic construct
  source 1..11: mol_type = other DNA
gaggagccacc

SEQ ID NO: 9023-9199 - skipped (177 entries)

SEQ ID NO: 9200 - protein, 441 aa, Homo sapiens; identical to SEQ ID NO: 1146